(19) United States
(12) Patent Application Publication
(10) Pub. No.: US 2023/0183692 A1
(43) Pub. Date: Jun. 15, 2023

(54) USE OF SEPT9 INHIBITORS FOR TREATING HEPATITIS B VIRUS INFECTION

(71) Applicant: Hoffmann-La Roche Inc., Little Falls, NJ (US)

(72) Inventors: Lykke Pedersen, Horsholm (DK); Souphalone Luangsay, Basel (CH); Johanna Marie Walther, Basel (CH); Alan James Mueller-Breckenridge, Basel (CH)

(21) Appl. No.: 17/845,592

(22) Filed: Jun. 21, 2022

Related U.S. Application Data
(63) Continuation of application No. PCT/EP2020/086405, filed on Dec. 16, 2020.

(30) Foreign Application Priority Data
Dec. 19, 2019 (EP) 19217771.5

(51) Int. Cl. C12N 15/113; A61P 31/20

(52) U.S. Cl. CPC C12N 15/113; A61P 31/20; C12N 2310/11; C12N 2310/32; C12N 2310/315; C12N 2310/341

(57) ABSTRACT

The present invention relates to a SEPT9 inhibitor for use in treatment of an HBV infection, in particular a chronic HBV infection. The invention in particular relates to the use of SEPT9 inhibitors for destabilizing cccDNA, such as HBV cccDNA. The invention also relates to nucleic acid molecules which are complementary to SEPT9 and capable of reducing the level of a SEPT9 mRNA. Also comprised in the present invention is a pharmaceutical composition and its use in the treatment of a HBV infection.

### CROSS-REFERENCE TO RELATED APPLICATIONS

[0001] This application is a continuation of International PCT Application No. PCT/EP2020/086405 filed on Dec. 16, 2020, which claims priority to European Patent Application No. 19217771.5 filed on Dec. 19, 2019, the contents of each application are incorporated herein by reference in their entireties.

### FIELD OF INVENTION

[0002] The present invention relates to SEPT9 inhibitors for use in treating and/or preventing a hepatitis B virus (HBV) infection, in particular a chronic HBV infection. The invention in particular relates to the use of SEPT9 inhibitors for destabilizing cccDNA, such as HBV cccDNA. The invention also relates to nucleic acid molecules, such as oligonucleotides including siRNA, shRNA and antisense oligonucleotides, that are complementary to SEPT9, and capable of reducing the expression of SEPT9. Also comprised in the present invention is a pharmaceutical composition and its use in the treatment and/or prevention of a HBV infection.

### BACKGROUND

[0003] Hepatitis B is an infectious disease caused by the hepatitis B virus (HBV), a small hepatotropic virus that replicates through reverse transcription. Chronic HBV infection is a key factor for severe liver diseases such as liver cirrhosis and hepatocellular carcinoma. Current treatments for chronic HBV infection are based on administration of pegylated type 1 interferons or nucleos(t)ide analogues, such as lamivudine, adefovir, entecavir, tenofovir disoproxil, and tenofovir alafenamide, which target the viral polymerase, a multifunctional reverse transcriptase. Treatment success is usually measured as loss of hepatitis B surface antigen (HBsAg). However, a complete HBsAg clearance is rarely achieved since Hepatitis B virus DNA persists in the body after infection. HBV persistence is mediated by an episomal form of the HBV genome which is stably maintained in the nucleus. This episomal form is called “covalently closed circular DNA” (cccDNA). The cccDNA serves as a template for all HBV transcripts, including pregenomic RNA (pgRNA), a viral replicative intermediate. The presence of a few copies of cccDNA might be sufficient to reinitiate a full-blown HBV infection. Current treatments for HBV do not target cccDNA. A cure of chronic HBV infection, however, would require the elimination of cccDNA (reviewed by Nassal, Gut. 2015 Dec;64(12):1972-84. doi: 10.1136/gutjnl-2015-309809).

[0004] SEPT9 (Septin 9, also known as MSF, MSF1, NAPB, SINT1, PNUTL4, SeptD1 and AF17q25) is a member of the septin family involved in cytokinesis and cell cycle control. Septins form a family of conserved GTP-binding proteins originally identified from cell cycle and septation mutations in yeast.

[0005] SEPT9 has been associated with various diseases and disorders. Mutations in the SEPT9 gene cause hereditary neuralgic amyotrophy, also known as neuritis with brachial predilection. A chromosomal translocation involving this gene on chromosome 17 and the MLL gene on chromosome 11 results in acute myelomonocytic leukemia. Generally, SEPT9

[0006] overexpression has been observed in diverse tumor types (Russell and Hall British Journal of Cancer (2005) 93, 499 - 503. doi:10.1038/sj.bjc.6602753).

[0007] WO 2006/038208 discloses that the SEPT9 gene is overexpressed in mouse mammary gland adenocarcinomas and human breast cancer cell lines.

[0008] WO 2007/115213 relates to detecting expression levels and methylation levels of SEPT9 to diagnose cancer.

[0009] CN108553478 discloses short hairpin RNAi molecules targeting SEPT9. The molecules can be used in the treatment of glioblastoma.

[0010] Xu et al. showed with shRNA that Knockdown of SEPT9 and SEPT2 in A172/U87-MG was able to inhibit Glioblastoma (GBM) cell proliferation and arrest cell cycle progression in the S phase in a synergistic mechanism. Moreover, suppression of SEPT9 and SEPT2 decreased the GBM cell invasive capability and significantly impaired the growth of glioma xenografts in nude mice (Xu et al. Cell Death and Disease (2018) 9:514. DOI 10.1038/s41419-018-0547-4).

[0011] Reduction of a SEPT9-v1 using RNAi based approaches has been shown to reduce proliferative effects in various types of cancers (Gonzalez et al Cancer Res 2007; 67: (18) DOI: 10.1158/0008-5472.CAN-07-1474; and Amir et al Molecular Cancer Research Vol 8(5):643. DOI: 10.1158/1541-7786.MCR-09-0497). Further SEPT9 isoform specific siRNA’s are described in Verdier-Pinard et al. Scientific Reports 2017, 7:44976. doi: 10.1038/srep44976.

[0012] Abdallah et al. showed that knock-down of SEPT9 using specific siRNA affected lipid droplets accumulation, microtubules organization and dropped HCV replication (Abdallah, A. et al., Journal of Hepatology, Volume 56, S328, Abstracts of The International Liver Congress 2012 - 47th annual meeting of the European Association for the Study of the Liver, Abstract 840). Similarly, Akil et al. analyzed the expression of SEPT9 in HCV-induced cirrhosis. It was demonstrated using siRNA that SEPT9 regulates lipid droplets (LD) growth in HCV infected cells and it was also indicated SEPT9 has a regulatory role in HCV-dependent microtubule organization (Akil et al., Nat Commun. 2016 Jul 15;7:12203. doi: 10.1038/ncomms12203.

[0013] Iwamoto et al. likewise analyzed the relevance of microtubules in HBV and suggest that their disruption decrease the assembly of HBV capsid resulting in reduced replication. The Akil et al 2016 ref above is cited, but it is not show, nor suggested, that SEPT9 has any effect on HBV (Iwamoto et al., Sci Rep. 2017;7(1):10620. doi:10.1038/s41598-017-11015-4).).

[0014] To our knowledge, there are r no specific examples of the use of inhibitors targeting SEPT9 in the treatment of HBV. Furthermore SEPT9 has never been identified as a cccDNA dependency factor in the context of cccDNA stability and maintenance, nor have molecules inhibiting SEPT9 ever been suggested as cccDNA destabilizers for the treatment of HBV infection.

### Objective of the Invention

[0015] The present invention shows that there is an association between the inhibition of SEPT9 and reduction of cccDNA in an HBV infected cell, which is relevant in the treatment of HBV infected individuals. An objective of the present invention is to identify SEPT9 inhibitors which reduce cccDNA in an HBV infected cell. Such SEPT9 inhibitors can be used in the treatment of HBV infection.

[0016] The present invention further identifies novel nucleic acid molecules, which are capable of inhibiting the expression of SEPT9 in vitro and in vivo.

### SUMMARY OF INVENTION

[0017] The present invention relates to oligonucleotides targeting a nucleic acid capable of modulating the expression of SEPT9 (Septin 9) and to treat or prevent diseases related to the functioning of the SEPT9.

[0018] Accordingly, in a first aspect the invention provides a SEPT9 inhibitor for use in the treatment and/or prevention of Hepatitis B virus (HBV) infection. In particular, a SEPT9 inhibitor capable of reducing HBV cccDNA and/or HBV pre-genomic RNA (pgRNA) is useful. Such an inhibitor is advantageously a nucleic acid molecule of 12 to 60 nucleotides in length, which is capable of reducing SEPT9 mRNA.

[0019] In a further aspect, the invention relates to a nucleic acid molecule of 12-60 nucleotides, such as of 12-30 nucleotides, comprising a contiguous nucleotides sequence of at least 12 nucleotides, in particular of 16 to 20 nucleotides, which is at least 90% complementary to a mammalian SEPT9, e.g. a human SEPT9, a mouse SEPT9 or a cynomolgus monkey SEPT9. Such a nucleic acid molecule is capable of inhibiting the expression of SEPT9 in a cell expressing SEPT9. The inhibition of SEPT9 allows for a reduction of the amount of cccDNA present in the cell. The nucleic acid miolecule can be selected from a single stranded antisense oligonucleotide, a double stranded siRNA molecule or a shRNA nucleic acid molecule (in particular a chemically produced shRNA molecules).

[0020] A further aspect of the present invention relates to single stranded antisense oligonucleotides or siRNA’s that inhibit expression and/or activity of SEPT9. In particular, modified antisense oligonucleotides or modified siRNA comprising one or more 2′ sugar modified nucleoside(s) and one or more phosphorothioate linkage(s), which reduce SEPT9 mRNA are of advantageous.

[0021] In a further aspect, the invention provides pharmaceutical compositions comprising the SEPT9 inhibitor of the present invention, such as the antisense oligonucleotide or siRNA of the invention and a pharmaceutically acceptable excipient.

[0022] In a further aspect, the invention provides methods for in vivo or in vitro modulation of SEPT9 expression in a target cell which is expressing SEPT9, by administering a SEPT9 inhibitor of the present invention, such as an antisense oligonucleotide or composition of the invention in an effective amount to said cell. In some embodiments, the SEPT9 expression is reduced by at least 50%, or at least 60%, in the target cell compared to the level without any treatment or treated with a control. In some embodiments, the target cell is infected with HBV and the cccDNA in an HBV infected cell is reduced by at least 50%, or at least 60%, in the HBV infected target cell compared to the level without any treatment or treated with a control. In some embodiments, the target cell is infected with HBV and the cccDNA in an HBV infected cell is reduced by at least 25%, such as by at least 40%, in the HBV infected target cell compared to the level without any treatment or treated with a control. In some embodiments, the target cell is infected with HBV and the pgRNA in an HBV infected cell is reduced by at least 50%, or at least 60%, or at least 70%, or at least 80%, in the HBV infected target cell compared to the level without any treatment or treated with a control.

[0023] In a further aspect, the invention provides methods for treating or preventing a disease, disorder or dysfunction associated with in vivo activity of SEPT9 comprising administering a therapeutically or prophylactically effective amount of the SEPT9 inhibitor of the present invention, such as the antisense oligonucleotide or siRNA of the invention to a subject suffering from or susceptible to the disease, disorder or dysfunction.

[0024] Further aspects of the invention are conjugates of nucleic acid molecules of the invention and pharmaceutical compositions comprising the molecules of the invention. In particular conjugates targeting the liver are of interest, such as GalNAc clusters.

### BRIEF DESCRIPTION OF FIGURES

[0025] FIG. 1A-1 to FIG. 1L: Illustrate: exemplary antisense oligonucleotide conjugates, wherein the oligonucleotide is represented by the term “Oligonucleotide” and the asialoglycoprotein receptor targeting conjugate moieties are trivalent N-acetylgalactosamine moieties. Compounds in FIG. 1A-2 to FIG. 1D-2 comprise a di-lysine brancher molecule, a PEG3 spacer and three terminal GaINAc carbohydrate moieties. FIG. 1A-1 and FIG. 1A-2 show two different diastereoisomers of the same compound. In the compounds in FIG. 1A-1 and FIG. 1A-2, the oligonucleotide is attached directly to the asialoglycoprotein receptor targeting conjugate moiety without a linker.

[0026] FIG. 1B-1 and FIG. 1B-2 show two different diastereoisomers of the same compound. In the compounds in FIG. 1B-1 and FIGS. 1B-2, the oligonucleotide is attached directly to the asialoglycoprotein receptor targeting conjugate moiety without a linker.

[0027] FIG. 1C-1 and FIG. 1C-2 show two different diastereoisomers of the same compound. In the compounds in FIG. 1C-1 and FIG. 1C-2, the oligonucleotide is attached to the asialoglycoprotein receptor targeting conjugate moiety via a C6 linker.

[0028] FIG. 1D-1 and FIG. 1D-2 show two different diastereoisomers of the same compound. In the compounds in FIG. 1D-1 and FIG. 1D-2, the oligonucleotide is attached to the asialoglycoprotein receptor targeting conjugate moiety via a C6 linker.

[0029] The compounds in FIG. 1E, FIG. 1F, FIG. 1G, FIG. 1H, FIG. 1I, FIG. 1J, and FIG. 1K comprise a commercially available trebler brancher molecule and spacers of varying length and structure and three terminal GaINAc carbohydrate moieties. The compound in FIG. 1L is composed of monomeric GalNAc phosphoramidites added to the oligonucleotide while still on the solid support as part of the synthesis, wherein X = S or O, and independently Y = S or O, and n = 1-3 (see WO 2017/178656). FIG. 1B-1 and FIG. 1B-2 and FIG. 1D-1 and FIG. 1D-2 are also termed GalNAc2 or GN2 herein, without and with C6 linker respectively.

[0030] The two different diastereoisomers shown in each of FIG. 1A-1 to FIG. 1D-2 are the result of the conjugation reaction. A pool of a specific antisense oligonucleotide conjugate can therefore contain only one of the two different diastereoisomers, or a pool of a specific antisense oligonucleotide conjugate can contain a mixture of the two different diastereoisomers.

### DEFINITIONS

### HBV Infection

[0031] The term “hepatitis B virus infection” or “HBV infection” is commonly known in the art and refers to an infectious disease that is caused by the hepatitis B virus (HBV) and affects the liver. A HBV infection can be an acute or a chronic infection. Chronic hepatitis B virus (CHB) infection is a global disease burden affecting 248 million individuals worldwide. Approximately 686,000 deaths annually are attributed to HBV-related end-stage liver diseases and hepatocellular carcinoma (HCC) (GBD 2013; Schweitzer et al., Lancet. 2015 Oct 17;386(10003):1546-55). WHO projected that without expanded intervention, the number of people living with CHB infection will remain at the current high levels for the next 40-50 years, with a cumulative 20 million deaths occurring between 2015 and 2030 (WHO 2016). CHB infection is not a homogenous disease with singular clinical presentation. Infected individuals have progressed through several phases of CHB-associated liver disease in their life; these phases of disease are also the basis for treatment with standard of care (SOC). Current guidelines recommend treating only selected CHB-infected individuals based on three criteria - serum ALT level, HBV DNA level, and severity of liver disease (EASL, 2017). This recommendation was due to the fact that SOC i.e. nucleos(t)ide analogs (NAs) and pegylated interferon-alpha (PEG-IFN), are not curative and must be administered for long periods of time thereby increasing their safety risks. NAs effectively suppress HBV DNA replication; however, they have very limited/no effect on other viral markers. Two hallmarks of HBV infection, hepatitis B surface antigen (HBsAg) and covalently closed circular DNA (cccDNA), are the main targets of novel drugs aiming for HBV cure. In the plasma of CHB individuals, HBsAg subviral (empty) particles outnumber HBV virions by a factor of 103 to 105 (Ganem & Prince, N Engl J Med. 2004 Mar 11;350(11): 1118-29); its excess is believed to contribute to immunopathogenesis of the disease, including inability of individuals to develop neutralizing anti-HBs antibody, the serological marker observed following resolution of acute HBV infection.

[0032] In some embodiments, the term “HBV infection” refers to “chronic HBV infection”.

[0033] Further, the term encompasses infection with any HBV genotype.

[0034] In some embodiments, the patient to be treated is infected with HBV genotype A.

[0035] In some embodiments, the patient to be treated is infected with HBV genotype B.

[0036] In some embodiments, the patient to be treated is infected with HBV genotype C.

[0037] In some embodiments, the patient to be treated is infected with HBV genotype D.

[0038] In some embodiments, the patient to be treated is infected with HBV genotype E.

[0039] In some embodiments, the patient to be treated is infected with HBV genotype F.

[0040] In some embodiments, the patient to be treated is infected with HBV genotype G.

[0041] In some embodiments, the patient to be treated is infected with HBV genotype H.

[0042] In some embodiments, the patient to be treated is infected with HBV genotype I.

[0043] In some embodiments, the patient to be treated is infected with HBV genotype J.

### cccDNA (Covalently Closed Circular DNA)

[0044] cccDNA is the viral genetic template of HBV that resides in the nucleus of infected hepatocytes, where it gives rise to all HBV RNA transcripts needed for productive infection and is responsible for viral persistence during natural course of chronic HBV infection (Locarnini & Zoulim, Antivir Ther. 2010;15 Suppl 3:3-14. doi: 10.3851/IMP1619). Acting as a viral reservoir, cccDNA is the source of viral rebound after cessation of treatment, necessitating long term, often lifetime treatment. PEG-IFN can only be administered to a small subset of CHB due to its various side effects.

[0045] Consequently, novel therapies that can deliver a complete cure, defined by degradation or elimination of HBV cccDNA, to the majority of CHB patients are highly needed.

### Compound

[0046] Herein, the term “compound” means any molecule capable of inhibition SEPT9 expression or activity. Particular compounds of the invention are nucleic acid molecules, such as RNAi molecules or antisense oligonucleotides according to the invention or any conjugate comprising such a nucleic acid molecule. For example, herein the compound may be a nucleic acid molecule targeting SEPT9, in particular an antisense oligonucleotide or a siRNA.

### Oligonucleotide

[0047] The term “oligonucleotide” as used herein is defined as it is generally understood by the skilled person as a molecule comprising two or more covalently linked nucleosides. Such covalently bound nucleosides may also be referred to as nucleic acid molecules or oligomers.

[0048] The oligonucleotides referred to in the description and claims are generally therapeutic oligonucleotides below 70 nucleotides in length. The oligonucleotide may be or comprise a single stranded antisense oligonucleotide, or may be another nucleic acid molecule, such as a CRISPR RNA, a siRNA, shRNA, an aptamer, or a ribozyme. Therapeutic oligonucleotide molecules are commonly made in the laboratory by solid-phase chemical synthesis followed by purification and isolation. shRNA’s are however often delivered to cells using lentiviral vectors from which they are then transcribed to produce the single stranded RNA that will form a stem loop (hairpin) RNA structure that is capable of interacting with the RNA interference machinery (including the RNA-induced silencing complex (RISC)). In an embodiment of the present invention the shRNA is chemically produced shRNA molecules (not relying on cell based expression from plasmids or viruses). When referring to a sequence of the oligonucleotide, reference is made to the sequence or order of nucleobase moieties, or modifications thereof, of the covalently linked nucleotides or nucleosides. Generally, the oligonucleotide of the invention is man-made, and is chemically synthesized, and is typically purified or isolated. Although in some embodiments the oligonucleotide of the invention is a shRNA transcribed from a vector upon entry into the target cell. The oligonucleotide of the invention may comprise one or more modified nucleosides or nucleotides.

[0049] In some embodiments, the oligonucleotide of the invention comprises or consists of 10 to 70 nucleotides in length, such as from 12 to 60, such as from 13 to 50, such as from 14 to 40, such as from 15 to 30, such as from 16 to 25, such as from 16 to 22, such as from 16 to 20 contiguous nucleotides in length. Accordingly, the oligonucleotide of the present invention, in some embodiments, may have a length of 12 to 25 nucleotides. Alternatively, the oligonucleotide of the present invention, in some embodiments, may have a length of 15 to 22 nucleotides.

[0050] In some embodiments, the oligonucleotide or contiguous nucleotide sequence thereof comprises or consists of 24 or less nucleotides, such as 22, such as 20 or less nucleotides, such as 18 or less nucleotides, such as 14, 15, 16 or 17 nucleotides. It is to be understood that any range given herein includes the range endpoints. Accordingly, if a nucleic acid molecule is said to include from 12 to 25 nucleotides, both 12 and 25 nucleotides are included.

[0051] In some embodiments, the contiguous nucleotide sequence comprises or consists of 12, 13, 14, 15, 16, 17, 18, 19, 20, 21 or 22 contiguous nucleotides in length

[0052] The oligonucleotide(s) are for modulating the expression of a target nucleic acid in a mammal. In some embodiments, the nucleic acid molecules, such as for siRNAs, shRNAs and antisense oligonucleotides, are typically for inhibiting the expression of a target nucleic acid(s).

[0053] In one embodiment of the invention oligonucleotide is selected from a RNAi agent, such as a siRNA or shRNA. In another embodiment, the oligonucleotide is a single stranded antisense oligonucleotide, such as a high affinity modified antisense oligonucleotide interacting with RNase H.

[0054] In some embodiments, the oligonucleotide of the invention may comprise one or more modified nucleosides or nucleotides, such as 2′ sugar modified nucleosides.

[0055] In some embodiments, the oligonucleotide comprises phosphorothioate internucleoside linkages.

[0056] In some embodiments, the oligonucleotide may be conjugated to non-nucleosidic moieties (conjugate moieties).

[0057] A library of oligonucleotides is to be understood as a collection of variant oligonucleotides. The purpose of the library of oligonucleotides can vary. In some embodiments, the library of oligonucleotides is composed of oligonucleotides with overlapping nucleobase sequence targeting one or more mammalian SEPT9 target nucleic acids with the purpose of identifying the most potent sequence within the library of oligonucleotides. In some embodiments, the library of oligonucleotides is a library of oligonucleotide design variants (child nucleic acid molecules) of a parent or ancestral oligonucleotide, wherein the oligonucleotide design variants retaining the core nucleobase sequence of the parent nucleic acid molecule.

### Antisense Oligonucleotides

[0058] The term “antisense oligonucleotide” or “ASO” as used herein is defined as oligonucleotides capable of modulating expression of a target gene by hybridizing to a target nucleic acid, in particular to a contiguous sequence on a target nucleic acid. The antisense oligonucleotides are not essentially double stranded and are therefore not siRNAs or shRNAs. Preferably, the antisense oligonucleotides of the present invention are single stranded. It is understood that single stranded oligonucleotides of the present invention can form hairpins or intermolecular duplex structures (duplex between two molecules of the same oligonucleotide), as long as the degree of intra or inter self complementarity is less than 50% across of the full length of the oligonucleotide.

[0059] Advantageously, the single stranded antisense oligonucleotide of the invention does not contain RNA nucleosides, since this will decrease nuclease resistance.

[0060] Advantageously, the oligonucleotide of the invention comprises one or more modified nucleosides or nucleotides, such as 2′ sugar modified nucleosides. Furthermore, it is advantageous that the nucleosides which are not modified are DNA nucleosides.

### RNAi Molecules

[0061] Herein, the term “RNA interference (RNAi) molecule” refers to short double-stranded oligonucleotide containing RNA nucleosides and which mediates targeted cleavage of an RNA transcript via the RNA-induced silencing complex (RISC), where they interact with the catalytic RISC component argonaute. The RNAi molecule modulates, e g., inhibits, the expression of the target nucleic acid in a cell, e.g. a cell within a subject. such as a mammalian subject. RNAi molecules includes single stranded RNAi molecules (Lima at al 2012 Cell 150: 883) and double stranded siRNAs, as well as short hairpin RNAs (shRNAs). In some embodiments of the invention, the oligonucleotide of the invention or contiguous nucleotide sequence thereof is a RNAi agent, such as a siRNA.

### siRNA

[0062] The term “small interfering ribonucleic acid” or “siRNA” refers to a small interfering ribonucleic acid RNAi molecule. It is a class of double-stranded RNA molecules, also known in the art as short interfering RNA or silencing RNA. siRNAs typically comprise a sense strand (also referred to as a passenger strand) and an antisense strand (also referred to as the guide strand), wherein each strand are of 17 to 30 nucleotides in length, typically 19 to 25 nucleosides in length, wherein the antisense strand is complementary, such as at least 95% complementary, such as fully complementary, to the target nucleic acid (suitably a mature mRNA sequence), and the sense strand is complementary to the antisense strand so that the sense strand and antisense strand form a duplex or duplex region. siRNA strands may form a blunt ended duplex, or advantageously the sense and antisense strand 3′ ends may form a 3′ overhang of e.g. 1, 2 or 3 nucleosides to resemble the product produced by Dicer, which forms the RISC substrate in vivo. Effective extended forms of Dicer substrates have been described in US 8,349,809 and US 8,513,207, hereby incorporated by reference. In some embodiments, both the sense strand and antisense strand have a 2 nt 3′ overhang. The duplex region may therefore be, for example 17 to 25 nucleotides in length, such as 21 to 23 nucleotides in length.

[0063] Once inside a cell the antisense strand is incorporated into the RISC complex which mediate target degradation or target inhibition of the target nucleic acid. siRNAs typically comprise modified nucleosides in addition to RNA nucleosides. In one embodiment, the siRNA molecule may be chemically modified using modified internucleotide linkages and 2′ sugar modified nucleosides, such as 2′-4′ bicyclic ribose modified nucleosides, including LNA and cET or 2′ substituted modifications like of 2′-O-alkyl-RNA, 2′-O-methyl-RNA, 2′-alkoxy-RNA, 2′-O-methoxyethyl-RNA (MOE), 2′-amino-DNA, 2′-fluoro-DNA, arabino nucleic acid (ANA), 2′-fluoro-ANA. In particular 2′fluoro, 2′-O-methyl or 2′-O-methoxyethyl may be incorporated into siRNAs.

[0064] In some embodiments, all of the nucleotides of an siRNA sense (passenger) strand may be modified with 2′ sugar modified nucleosides such as LNA (see WO2004/083430, WO2007/085485 for example). In some embodiments, the passenger stand of the siRNA may be discontinuous (see WO2007/107162 for example). The incorporation of thermally destabilizing nucleotides occurring at a seed region of the antisense strand of siRNAs have been reported as useful in reducing off-target activity of siRNAs (see WO2018/098328 for example). Suitably the siRNA comprises a 5′ phosphate group or a 5′-phosphate mimic at the 5′ end of the antisense strand. In some embodiments, the 5′ end of the antisense strand is a RNA nucleoside.

[0065] In one embodiment, the siRNA molecule further comprises at least one phosphorothioate or methylphosphonate internucleoside linkage. The phosphorothioaie or methylphosphonate internucleoside linkage may be at the 3′- terminus one or both strand (e.g., the antisense strand; or the sense strand); or the phosphorothioate or methylphosphonate internucleoside linkage may be at the 5′-terminus of one or both strands (e.g., the antisense strand; or the sense strand); or the phosphorothioate or methylphosphonate internucleoside linkage may be at the both the 5′- and 3′-terminus of one or both strands (e.g., the antisense strand; or the sense strand). In some embodiments, the remaining internucleoside linkages are phosphodiester linkages. In some embodiments, siRNA molecules comprise one or more phosphorothioate internucleoside linkages.

[0066] In siRNA molecules phosphorothioate internucleoside linkages may reduce or the nuclease cleavage in RICS, it is therefore advantageous that not all internucleoside linkages in the antisense strand are modified.

[0067] The siRNA molecule may further comprise a ligand. In some embodiments, the ligand is conjugated to the 3′ end of the sense strand.

[0068] For biological distribution, siRNAs may be conjugated to a targeting ligand, and/or be formulated into lipid nanoparticleslipid nanoparticles.

[0069] Other aspects of the invention relate to pharmaceutical compositions comprising these dsRNA, such as siRNA molecules suitable for therapeutic use, and methods of inhibiting the expression of the target gene by administering the dsRNA molecules such as siRNAs of the invention, e.g., for the treatment of various disease conditions as disclosed herein.

### shRNA

[0070] The term “short hairpin RNA” or “shRNA” refers to molecules that are generally between 40 and 70 nucleotides in length, such as between 45 and 65 nucleotides in length, such as 50 and 60 nucleotides in length and form a stem loop (hairpin) RNA structure which interacts with the endonuclease known as Dicer which is believed to processes dsRNA into 19-23 base pair short interfering RNAs with characteristic two base 3′ overhangs which are then incorporated into an RNA-induced silencing complex (RISC). Upon binding to the appropriate target mRNA, one or more endonucleases within the RISC cleave the target to induce silencing. shRNA oligonucleotides may be chemically modified using modified internucleotide linkages and 2′ sugar modified nucleosides, such as 2′-4′ bicyclic ribose modified nucleosides, including LNA and cET or 2′ substituted modifications like of 2′-O-alkyl-RNA, 2′-O-methyl-RNA, 2′-alkoxy-RNA, 2′-O-methoxyethyl-RNA (MOE), 2′-amino-DNA, 2′-fluoro-DNA, arabino nucleic acid (ANA), 2′-fluoro-ANA.

[0071] In some embodiments, shRNA molecule comprises one or more phosphorothioate internucleoside linkages. In RNAi molecules phosphorothioate internucleoside linkages may reduce or the nuclease cleavage in RICS it is therefore advantageous that not al internucleoside linkages in the stem loop of the shRNA molecule are modified. Phosphorothioate internucleoside linkages can advantageously be placed in the 3′ and/or 5′ end of the stem loop of the shRNA molecule, in particular in the part of the molecule that is not complementary to the target nucleic acid. The region of the shRNA molecule that is complementary to the target nucleic acid may however also be modified in the first 2 to 3 internucleoside linkages in the part that is predicted to become the 3′ and/or 5′ terminal following cleavage by Dicer.

### Contiguous Nucleotide Sequence

[0072] The term “contiguous nucleotide sequence” refers to the region of the nucleic acid molecule which is complementary to the target nucleic acid. The term is used interchangeably herein with the term “contiguous nucleobase sequence” and the term “oligonucleotide motif sequence”. In some embodiments, all the nucleotides of the oligonucleotide constitute the contiguous nucleotide sequence. In some embodiments, the contiguous nucleotide sequence is included in the guide strand of an siRNA molecule. In some embodiments, the contiguous nucleotide sequence is the part of an shRNA molecule which is 100% complementary to the target nucleic acid. In some embodiments, the oligonucleotide comprises the contiguous nucleotide sequence, such as a F—G—F′ gapmer region, and may optionally comprise further nucleotide(s), for example a nucleotide linker region which may be used to attach a functional group (e.g. a conjugate group for targeting) to the contiguous nucleotide sequence. The nucleotide linker region may or may not be complementary to the target nucleic acid. In some embodiments, the nucleobase sequence of the antisense oligonucleotide is the contiguous nucleotide sequence. In some embodiments, the contiguous nucleotide sequence is 100% complementary to the target nucleic acid.

### Nucleotides and Nucleosides

[0073] Nucleotides and nucleosides are the building blocks of oligonucleotides and polynucleotides, and for the purposes of the present invention include both naturally occurring and non-naturally occurring nucleotides and nucleosides. In nature, nucleotides, such as DNA and RNA nucleotides comprise a ribose sugar moiety, a nucleobase moiety and one or more phosphate groups (which is absent in nucleosides). Nucleosides and nucleotides may also interchangeably be referred to as “units” or “monomers”.

### Modified Nucleoside

[0074] The term “modified nucleoside” or “nucleoside modification” as used herein refers to nucleosides modified as compared to the equivalent DNA or RNA nucleoside by the introduction of one or more modifications of the sugar moiety or the (nucleo)base moiety. Advantageously, one or more of the modified nucleoside comprises a modified sugar moiety. The term modified nucleoside may also be used herein interchangeably with the term “nucleoside analogue” or modified “units” or modified “monomers”. Nucleosides with an unmodified DNA or RNA sugar moiety are termed DNA or RNA nucleosides herein. Nucleosides with modifications in the base region of the DNA or RNA nucleoside are still generally termed DNA or RNA if they allow Watson Crick base pairing.

### Modified Internucleoside Linkage

[0075] The term “modified internucleoside linkage” is defined as generally understood by the skilled person as linkages other than phosphodiester (PO) linkages, that covalently couples two nucleosides together. The oligonucleotides of the invention may therefore comprise one or more modified internucleoside linkages, such as a one or more phosphorothioate internucleoside linkages, or one or more phosphorodithioate internucleoside linkages.

[0076] With the oligonucleotide of the invention it is advantageous to use phosphorothioate internucleoside linkages.

[0077] Phosphorothioate internucleoside linkages are particularly useful due to nuclease resistance, beneficial pharmacokinetics and ease of manufacture. In some embodiments, at least 50% of the internucleoside linkages in the oligonucleotide, or contiguous nucleotide sequence thereof, are phosphorothioate, such as at least 60%, such as at least 70%, such as at least 75%, such as at least 80% or such as at least 90% of the internucleoside linkages in the oligonucleotide, or contiguous nucleotide sequence thereof, are phosphorothioate. In some embodiments, all of the internucleoside linkages of the oligonucleotide, or contiguous nucleotide sequence thereof, are phosphorothioate.

[0078] In some advantageous embodiments, all the internucleoside linkages of the contiguous nucleotide sequence of the oligonucleotide are phosphorothioate, or all the internucleoside linkages of the oligonucleotide are phosphorothioate linkages.

[0079] It is recognized that, as disclosed in EP 2 742 135, antisense oligonucleotides may comprise other internucleoside linkages (other than phosphodiester and phosphorothioate), for example alkyl phosphonate/methyl phosphonate internucleoside linkages, which according to EP 2 742 135 may for example be tolerated in an otherwise DNA phosphorothioate gap region.

### Nucleobase

[0080] The term nucleobase includes the purine (e.g. adenine and guanine) and pyrimidine (e.g. uracil, thymine and cytosine) moiety present in nucleosides and nucleotides which form hydrogen bonds in nucleic acid hybridization. In the context of the present invention the term nucleobase also encompasses modified nucleobases which may differ from naturally occurring nucleobases, but are functional during nucleic acid hybridization. In this context “nucleobase” refers to both naturally occurring nucleobases such as adenine, guanine, cytosine, thymidine, uracil, xanthine and hypoxanthine, as well as non-naturally occurring variants. Such variants are for example described in Hirao et al (2012) Accounts of Chemical Research vol 45 page 2055 and Bergstrom (2009) Current Protocols in Nucleic Acid Chemistry Suppl. 37 1.4.1.

[0081] In some embodiments, the nucleobase moiety is modified by changing the purine or pyrimidine into a modified purine or pyrimidine, such as substituted purine or substituted pyrimidine, such as a nucleobased selected from isocytosine, pseudoisocytosine, 5-methyl cytosine, 5-thiozolo-cytosine, 5-propynyl-cytosine, 5-propynyl-uracil, 5-bromouracil 5-thiazolo-uracil, 2-thio-uracil, 2′thio-thymine, inosine, diaminopurine, 6-aminopurine, 2-aminopurine, 2,6-diaminopurine and 2-chloro-6-aminopurine.

[0082] The nucleobase moieties may be indicated by the letter code for each corresponding nucleobase, e.g. A, T, G, C or U, wherein each letter may optionally include modified nucleobases of equivalent function. For example, in the exemplified oligonucleotides, the nucleobase moieties are selected from A, T, G, C, and 5-methyl cytosine. Optionally, for LNA gapmers, 5-methyl cytosine LNA nucleosides may be used.

### Modified Oligonucleotide

[0083] The term “modified oligonucleotide” describes an oligonucleotide comprising one or more sugar-modified nucleosides and/or modified internucleoside linkages. The term chimeric” oligonucleotide is a term that has been used in the literature to describe oligonucleotides comprising modified nucleosides and DNA nucleosides. The antisense oligonucleotide of the invention is advantageously a chimeric oligonucleotide.

### Complementarity

[0084] The term “complementarity” or “complementary” describes the capacity for Watson-Crick base-pairing of nucleosides/nucleotides. Watson-Crick base pairs are guanine (G)-cytosine (C) and adenine (A) - thymine (T)/uracil (U). It will be understood that oligonucleotides may comprise nucleosides with modified nucleobases, for example 5-methyl cytosine is often used in place of cytosine, and as such the term complementarity encompasses Watson Crick base-paring between non-modified and modified nucleobases (see for example Hirao et al (2012) Accounts of Chemical Research vol 45 page 2055 and Bergstrom (2009) Current Protocols in Nucleic Acid Chemistry Suppl. 37 1.4.1).

[0085] The term “% complementary” as used herein, refers to the proportion of nucleotides (in percent) of a contiguous nucleotide sequence in a nucleic acid molecule (e.g. oligonucleotide) which across the contiguous nucleotide sequence, are complementary to a reference sequence (e.g. a target sequence or sequence motif). The percentage of complementarity is thus calculated by counting the number of aligned nucleobases that are complementary (from Watson Crick base pair) between the two sequences (when aligned with the target sequence 5′-3′ and the oligonucleotide sequence from 3′-5′), dividing that number by the total number of nucleotides in the oligonucleotide and multiplying by 100. In such a comparison a nucleobase/nucleotide which does not align (form a base pair) is termed a mismatch. Insertions and deletions are not allowed in the calculation of % complementarity of a contiguous nucleotide sequence. It will be understood that in determining complementarity, chemical modifications of the nucleobases are disregarded as long as the functional capacity of the nucleobase to form Watson Crick base pairing is retained (e.g. 5′-methyl cytosine is considered identical to a cytosine for the purpose of calculating % identity).

[0086] The term “fully complementary”, refers to 100% complementarity.

### Identity

[0087] The term “Identity” as used herein, refers to the proportion of nucleotides (expressed in percent) of a contiguous nucleotide sequence in a nucleic acid molecule (e.g. oligonucleotide) which across the contiguous nucleotide sequence, are identical to a reference sequence (e.g. a sequence motif). The percentage of identity is thus calculated by counting the number of aligned nucleobases that are identical (a Match) between two sequences (in the contiguous nucleotide sequence of the compound of the invention and in the reference sequence), dividing that number by the total number of nucleotides in the oligonucleotide and multiplying by 100. Therefore, Percentage of Identity = (Matches x 100)/Length of aligned region (e.g. the contiguous nucleotide sequence). Insertions and deletions are not allowed in the calculation the percentage of identity of a contiguous nucleotide sequence. It will be understood that in determining identity, chemical modifications of the nucleobases are disregarded as long as the functional capacity of the nucleobase to form Watson Crick base pairing is retained (e.g. 5-methyl cytosine is considered identical to a cytosine for the purpose of calculating % identity).

### Hybridization

[0088] The term “hybridizing” or “hybridizes” as used herein is to be understood as two nucleic acid strands (e.g. an oligonucleotide and a target nucleic acid) forming hydrogen bonds between base pairs on opposite strands thereby forming a duplex. The affinity of the binding between two nucleic acid strands is the strength of the hybridization. It is often described in terms of the melting temperature (Tₘ) defined as the temperature at which half of the oligonucleotides are duplexed with the target nucleic acid. At physiological conditions Tₘ is not strictly proportional to the affinity (Mergny and Lacroix, 2003, Oligonucleotides 13:515-537). The standard state Gibbs free energy ΔG° is a more accurate representation of binding affinity and is related to the dissociation constant (K_{d}) of the reaction by ΔG°=-RTIn(K_{d}), where R is the gas constant and T is the absolute temperature. Therefore, a very low ΔG° of the reaction between an oligonucleotide and the target nucleic acid reflects a strong hybridization between the oligonucleotide and target nucleic acid. ΔG° is the energy associated with a reaction where aqueous concentrations are 1 M, the pH is 7, and the temperature is 37° C. The hybridization of oligonucleotides to a target nucleic acid is a spontaneous reaction and for spontaneous reactions ΔG° is less than zero. ΔG° can be measured experimentally, for example, by use of the isothermal titration calorimetry (ITC) method as described in Hansen et al., 1965, Chem. Comm. 36-38 and Holdgate et al., 2005, Drug Discov Today. The skilled person will know that commercial equipment is available for ΔG° measurements. ΔG° can also be estimated numerically by using the nearest neighbor model as described by SantaLucia, 1998, Proc Natl Acad Sci USA. 95: 1460-1465 using appropriately derived thermodynamic parameters described by Sugimoto et al., 1995, Biochemistry 34:11211-11216 and McTigue et al., 2004, Biochemistry 43:5388-5405. In order to have the possibility of modulating its intended nucleic acid target by hybridization, oligonucleotides of the present invention hybridize to a target nucleic acid with estimated ΔG° values below -10 kcal for oligonucleotides that are 10 to 30 nucleotides in length. In some embodiments, the degree or strength of hybridization is measured by the standard state Gibbs free energy AG°. The oligonucleotides may hybridize to a target nucleic acid with estimated ΔG° values below -10 kcal, such as below -15 kcal, such as below -20 kcal and such as below -25 kcal for oligonucleotides that are 8 to 30 nucleotides in length. In some embodiments, the oligonucleotides hybridize to a target nucleic acid with an estimated ΔG° value in the range of -10 to -60 kcal, such as -12 to -40, such as from -15 to -30 kcal or-16 to -27 kcal such as -18 to -25 kcal.

### Target Nucleic Acid

[0089] According to the present invention, the target nucleic acid is a nucleic acid which encodes mammalian SEPT9 and may for example be a gene, a RNA, a mRNA, and pre-mRNA, a mature mRNA or a cDNA sequence. The target may therefore be referred to as SEPT9 target nucleic acid.

[0090] Suitably, the target nucleic acid encodes a SEPT9 protein, in particular mammalian SEPT9, such as the human SEPT9 gene encoding pre-mRNA or mRNA sequences provided herein as SEQ ID NO: 1.

[0091] The therapeutic nucleic acid molecules of the invention may for example target exon regions of a mammalian SEPT9 (in particular siRNA and shRNA, but also antisense oligonucleotides), or may for example target any intron region in the SEPT9 pre-mRNA (in particular antisense oligonucleotides). The human SEPT9 gene encodes 47 transcripts, 37 of which are protein coding and therefore potential nucleic acid targets. In an embodiment, the target is a mature SEPT9 mRNA which encodes for a SEPT9 protein.

[0092] Table 1 lists predicted exon and intron regions of SEQ ID NO: 1, i.e. of the human SEPT9 pre-mRNA sequence.

TABLE 1

Exon and intron regions in the human SEPT9 pre-mRNA

| Exonic regions in the human SEPT9 premRNA (SEQ ID NO: 1) | | | Intronic regions in the human SEPT9 premRNA (SEQ ID NO: 1) | | |
|---|---|---|---|---|---|
| ID | start | end | ID | start | end |
| E1 | 931 | 986 | I1 | 987 | 26572 |
| E2 | 26573 | 26629 | I2 | 26630 | 121490 |
| E3 | 121491 | 122135 | I3 | 122136 | 201575 |
| E4 | 201576 | 201767 | I4 | 201768 | 206855 |
| E5 | 206856 | 206984 | I5 | 206985 | 207671 |
| E6 | 207672 | 207753 | I6 | 207754 | 208158 |
| E7 | 208159 | 208296 | I7 | 208297 | 210173 |
| E8 | 210174 | 210291 | I8 | 210292 | 212052 |
| E9 | 212053 | 212148 | I9 | 212149 | 212411 |
| E10 | 212412 | 212508 | I10 | 212509 | 216746 |
| E11 | 216747 | 216798 | I11 | 216799 | 217954 |
| E12 | 217955 | 220025 | | | |

[0093] Suitably, the target nucleic acid encodes a SEPT9 protein, in particular mammalian SEPT9, such as human SEPT9 (See for example Table 2 and Table 3) which provides an overview on the genomic sequences of human, cyno monkey and mouse SEPT9 (Table 2) and on pre-mRNA sequences for human, monkey and mouse SEPT9 and for the mature mRNAs for human SEPT9 (Table 3).

[0094] In some embodiments, the target nucleic acid is selected from the group consisting of SEQ ID NO: 1, 2 and/or 3, or naturally occurring variants thereof (e.g. sequences encoding a mammalian SEPT9).

TABLE 2

Genome and assembly information for SEPT9 across species

| Species | Chr. | Stra nd | Genomic coordinates Start End | | Assembly | ensembl gene_id |
|---|---|---|---|---|---|---|
| Human | 17 | Fwd | 77280569 | 77500596 | GRCh38.p12 | ENSG00000184640 |
| Cyno monkey | 16 | Fwd | 74667799 | 74881595 | Macaca_fascicularis_5.0 | ENSMFAG00000035 508 |
| Mouse | 11 | Fwd | 117199661 | 117362325 | GRCm38.p4 | ENSMUSG00000059 248 |

Fwd = forward strand. Rv = reverse strand. The genome coordinates provide the pre-mRNA sequence (genomic sequence).

[0095] If employing the nucleic acid molecule of the invention in research or diagnostics the target nucleic acid may be a cDNA or a synthetic nucleic acid derived from DNA or RNA.

[0096] For in vivo or in vitro application, the therapeutic nucleic acid molecule of the invention is typically capable of inhibiting the expression of the SEPT9 target nucleic acid in a cell which is expressing the SEPT9 target nucleic acid. In some embodiments, said cell comprises HBV cccDNA. The contiguous sequence of nucleobases of the nucleic acid molecule of the invention is typically complementary to a conserved region of the SEPT9 target nucleic acid, as measured across the length of the nucleic acid molecule, optionally with the exception of one or two mismatches, and optionally excluding nucleotide based linker regions which may link the oligonucleotide to an optional functional group such as a conjugate, or other non-complementary terminal nucleotides. The target nucleic acid is a messenger RNA, such as a pre-mRNA which encodes mammalian SEPT9 protein, such as human SEPT9, e.g. the human SEPT9 pre-mRNA sequence, such as that disclosed as SEQ ID NO: 1, the monkey SEPT9 pre-mRNA sequence, such as that disclosed as SEQ ID NO: 2, or the mouse SEPT9 pre-mRNA sequence, such as that disclosed as SEQ ID NO: 3. SEQ ID NOs: 1-3 are DNA sequences - it will be understood that target RNA sequences have uracil (U) bases in place of the thymidine bases (T).

[0097] Further information on exemplary target nucleic acids is provided in Tables 2 and 3.

TABLE 3

Overview on target nucleic acids

| | |
|---|---|
| Target Nucleic Acid, Species, Reference | Sequence ID |
| SEPT9 Homo sapiens pre-mRNA | SEQ ID NO: 1 |
| SEPT9 Macaca fascicularis pre-mRNA | SEQ ID NO: 2 |
| SEPT9 Mus musculus pre-mRNA | SEQ ID NO: 3 |

[0098] Note SEQ ID NO: 2 comprises regions of multiple NNNNs, where the sequencing has been unable to accurately refine the sequence, and a degenerate sequence is therefore included. For the avoidance of doubt the compounds of the invention are complementary to the actual target sequence and are not therefore degenerate compounds.

[0099] In some embodiments, the target nucleic acid is SEQ ID NO: 1.

[0100] In some embodiments, the target nucleic acid is SEQ ID NO: 2.

[0101] In some embodiments, the target nucleic acid is SEQ ID NO: 3.

### Target Sequence

[0102] The term “target sequence” as used herein refers to a sequence of nucleotides present in the target nucleic acid which comprises the nucleobase sequence which is complementary to the oligonucleotide or nucleic acid molecule of the invention. In some embodiments, the target sequence consists of a region on the target nucleic acid with a nucleobase sequence that is complementary to the contiguous nucleotide sequence of the oligonucleotide of the invention. This region of the target nucleic acid may interchangeably be referred to as the target nucleotide sequence, target sequence or target region. In some embodiments, the target sequence is longer than the complementary sequence of a nucleic acid molecule of the invention, and may, for example represent a preferred region of the target nucleic acid which may be targeted by several nucleic acid molecules of the invention.

[0103] In some embodiments, the target sequence is a sequence selected from the group consisting of a human SEPT9 mRNA exon, such as a SEPT9 human mRNA exon selected from the group consisting of e1, e2, e3, e4, e5, e6, e7, e8, e9, e10, e11 and e12 (see for example Table 1 above).

[0104] Accordingly, the invention provides for an oligonucleotide, wherein said oligonucleotide comprises a contiguous sequence which is at least 90% complementary, such as fully complementary to an exon region of SEQ ID NO: 1, selected from the group consisting of e1 - e12 (see Table 1).

[0105] In some embodiments, the target sequence is a sequence selected from the group consisting of a human SEPT9 mRNA intron, such as a SEPT9 human mRNA intron selected from the group consisting of i1, i2, i3, i4, i5, i6, i7, i8, i9, i10 and i11 (see for example Table 1 above).

[0106] Accordingly, the invention provides for an oligonucleotide, wherein said oligonucleotide comprises a contiguous sequence which is at least 90% complementary, such as fully complementary to an intron region of SEQ ID NO: 1, selected from the group consisting of i1 - i11 (see Table 1).

[0107] In some embodiments, the target sequence is selected from the group consisting of SEQ ID NOs: 4, 5, 6 and 7. In some embodiments, the contiguous nucleotide sequence as referred to herein is at least 90% complementary, such as at least 95% complementary to a target sequence selected from the group consisting of SEQ ID NOs: 4, 5, 6 and 7. In some embodiments, the contiguous nucleotide sequence is fully complementary to a target sequence selected from the group consisting of SEQ ID NOs: 4, 5, 6 and 7.

[0108] The oligonucleotide of the invention comprises a contiguous nucleotide sequence which is complementary to or hybridizes to a region on the target nucleic acid, such as a target sequence described herein.

[0109] The target nucleic acid sequence to which the therapeutic oligonucleotideis complementary or hybridizes to generally comprises a stretch of contiguous nucleobases of at least 10 nucleotides. The contiguous nucleotide sequence is between 12 to 70 nucleotides, such as 12 to 50, such as 13 to 30, such as 14 to 25, such as 15 to 20, such as 16 to 18 contiguous nucleotides.

[0110] In some embodiments, the oligonucleotideof the present invention targets a region shown in Table 4.

TABLE 4

Exemplary target regions

| Target region | start SEQ ID NO: 1 | end SEQ ID NO:1 | Target region | start SEQ ID NO: 1 | end SEQ ID NO:1 | Target region | start SEQ ID NO: 1 | end SEQ ID NO:1 |
|---|---|---|---|---|---|---|---|---|
| 1C | 799 | 814 | 690C | 65723 | 65739 | 1379C | 131572 | 131585 |
| 2C | 806 | 819 | 691C | 65725 | 65740 | 1380C | 131912 | 131925 |
| 3C | 932 | 960 | 692C | 66327 | 66340 | 1381C | 132157 | 132172 |
| 4C | 962 | 978 | 693C | 66553 | 66566 | 1382C | 132375 | 132388 |
| 5C | 1729 | 1742 | 694C | 66602 | 66620 | 1383C | 132518 | 132554 |
| 6C | 1732 | 1746 | 695C | 66603 | 66620 | 1384C | 132519 | 132534 |
| 7C | 1734 | 1747 | 696C | 66707 | 66720 | 1385C | 132521 | 132555 |
| 8C | 2213 | 2226 | 697C | 66810 | 66825 | 1386C | 132542 | 132556 |
| 9C | 2589 | 2608 | 698C | 66810 | 66823 | 1387C | 132543 | 132556 |
| 10C | 2589 | 2603 | 699C | 66810 | 66824 | 1388C | 132584 | 132603 |
| 11C | 2590 | 2606 | 700C | 66811 | 66824 | 1389C | 132710 | 132723 |
| 12C | 2590 | 2607 | 701C | 66812 | 66825 | 1390C | 133013 | 133026 |
| 13C | 2590 | 2604 | 702C | 66813 | 66826 | 1391C | 133279 | 133293 |
| 14C | 2592 | 2610 | 703C | 66813 | 66829 | 1392C | 133281 | 133294 |
| 15C | 2592 | 2609 | 704C | 66813 | 66827 | 1393C | 133365 | 133378 |
| 16C | 2593 | 2609 | 705C | 66814 | 66829 | 1394C | 133368 | 133385 |
| 17C | 2594 | 2611 | 706C | 67662 | 67675 | 1395C | 133369 | 133388 |
| 18C | 2594 | 2610 | 707C | 67668 | 67682 | 1396C | 133369 | 133383 |
| 19C | 2596 | 2611 | 708C | 67727 | 67749 | 1397C | 133370 | 133386 |
| 20C | 2598 | 2613 | 709C | 67727 | 67743 | 1398C | 133370 | 133387 |
| 21C | 2599 | 2614 | 710C | 67728 | 67744 | 1399C | 133370 | 133384 |
| 22C | 2599 | 2613 | 711C | 67729 | 67749 | 1400C | 133372 | 133389 |
| 23C | 2599 | 2612 | 712C | 67729 | 67745 | 1401C | 133373 | 133389 |
| 24C | 2600 | 2613 | 713C | 67730 | 67746 | 1402C | 133377 | 133391 |
| 25C | 2704 | 2721 | 714C | 67731 | 67747 | 1403C | 133408 | 133424 |
| 26C | 2732 | 2746 | 715C | 67732 | 67749 | 1404C | 133412 | 133426 |
| 27C | 2875 | 2888 | 716C | 67732 | 67748 | 1405C | 133504 | 133519 |
| 28C | 3353 | 3369 | 717C | 67734 | 67749 | 1406C | 133505 | 133519 |
| 29C | 4037 | 4050 | 718C | 67737 | 67750 | 1407C | 133505 | 133518 |
| 30C | 4059 | 4073 | 719C | 67838 | 67851 | 1408C | 133508 | 133524 |
| 31C | 4059 | 4072 | 720C | 67993 | 68008 | 1409C | 133508 | 133523 |
| 32C | 4062 | 4078 | 721C | 68515 | 68528 | 1410C | 133509 | 133523 |
| 33C | 4062 | 4077 | 722C | 68524 | 68537 | 1411C | 133509 | 133522 |
| 34C | 4063 | 4077 | 723C | 68525 | 68540 | 1412C | 133510 | 133524 |
| 35C | 4063 | 4076 | 724C | 68529 | 68543 | 1413C | 133768 | 133785 |
| 36C | 4064 | 4078 | 725C | 68530 | 68543 | 1414C | 133768 | 133783 |
| 37C | 4077 | 4093 | 726C | 68531 | 68546 | 1415C | 133771 | 133785 |
| 38C | 4077 | 4091 | 727C | 68543 | 68557 | 1416C | 133771 | 133784 |
| 39C | 4077 | 4092 | 728C | 68543 | 68556 | 1417C | 133772 | 133785 |
| 40C | 4077 | 4090 | 729C | 68665 | 68685 | 1418C | 134001 | 134018 |
| 41C | 4174 | 4189 | 730C | 68665 | 68681 | 1419C | 134002 | 134018 |
| 42C | 4174 | 4188 | 731C | 68665 | 68683 | 1420C | 134002 | 134019 |
| 43C | 4175 | 4189 | 732C | 68665 | 68678 | 1421C | 134002 | 134016 |
| 44C | 4176 | 4189 | 733C | 68665 | 68682 | 1422C | 134004 | 134022 |
| 45C | 4177 | 4190 | 734C | 68669 | 68685 | 1423C | 134004 | 134021 |
| 46C | 4348 | 4361 | 735C | 68672 | 68685 | 1424C | 134005 | 134028 |
| 47C | 4602 | 4616 | 736C | 68813 | 68827 | 1425C | 134005 | 134021 |
| 48C | 4602 | 4615 | 737C | 68814 | 68827 | 1426C | 134006 | 134028 |
| 49C | 4826 | 4839 | 738C | 70042 | 70070 | 1427C | 134006 | 134022 |
| 50C | 4828 | 4846 | 739C | 70058 | 70072 | 1428C | 134007 | 134023 |
| 51C | 4833 | 4846 | 740C | 70389 | 70403 | 1429C | 134008 | 134024 |
| 52C | 4942 | 4957 | 741C | 70431 | 70444 | 1430C | 134009 | 134025 |
| 53C | 4942 | 4956 | 742C | 70470 | 70483 | 1431C | 134010 | 134026 |
| 54C | 4943 | 4957 | 743C | 70488 | 70504 | 1432C | 134011 | 134028 |
| 55C | 4944 | 4957 | 744C | 70503 | 70517 | 1433C | 134011 | 134027 |
| 56C | 4945 | 4958 | 745C | 70597 | 70610 | 1434C | 134013 | 134028 |
| 57C | 4945 | 4959 | 746C | 70661 | 70699 | 1435C | 134014 | 134028 |
| 58C | 4960 | 4973 | 747C | 70661 | 70676 | 1436C | 134015 | 134028 |
| 59C | 5632 | 5646 | 748C | 70661 | 70680 | 1437C | 134247 | 134260 |
| 60C | 6153 | 6166 | 749C | 70661 | 70686 | 1438C | 134248 | 134261 |
| 61C | 6388 | 6402 | 750C | 70662 | 70699 | 1439C | 134475 | 134489 |
| 62C | 6414 | 6427 | 751C | 70663 | 70701 | 1440C | 134782 | 134795 |
| 63C | 6990 | 7003 | 752C | 70663 | 70678 | 1441C | 134936 | 134949 |
| 64C | 7041 | 7057 | 753C | 70663 | 70682 | 1442C | 135054 | 135067 |
| 65C | 7220 | 7233 | 754C | 70663 | 70688 | 1443C | 135059 | 135075 |
| 66C | 7483 | 7496 | 755C | 70664 | 70701 | 1444C | 135059 | 135074 |
| 67C | 7822 | 7838 | 756C | 70665 | 70680 | 1445C | 135059 | 135072 |
| 68C | 7897 | 7919 | 757C | 70665 | 70684 | 1446C | 135059 | 135076 |
| 69C | 8083 | 8102 | 758C | 70665 | 70690 | 1447C | 135059 | 135073 |
| 70C | 8108 | 8121 | 759C | 70667 | 70682 | 1448C | 135060 | 135073 |
| 71C | 8511 | 8524 | 760C | 70667 | 70686 | 1449C | 135060 | 135077 |
| 72C | 8544 | 8560 | 761C | 70667 | 70692 | 1450C | 135061 | 135074 |
| 73C | 8544 | 8558 | 762C | 70669 | 70684 | 1451C | 135062 | 135075 |
| 74C | 8544 | 8559 | 763C | 70669 | 70688 | 1452C | 135063 | 135076 |
| 75C | 8544 | 8557 | 764C | 70669 | 70694 | 1453C | 135064 | 135077 |
| 76C | 8641 | 8655 | 765C | 70671 | 70686 | 1454C | 135064 | 135078 |
| 77C | 8654 | 8667 | 766C | 70671 | 70690 | 1455C | 135066 | 135079 |
| 78C | 8659 | 8672 | 767C | 70671 | 70696 | 1456C | 135066 | 135081 |
| 79C | 8790 | 8807 | 768C | 70673 | 70688 | 1457C | 135067 | 135081 |
| 80C | 8790 | 8805 | 769C | 70673 | 70692 | 1458C | 135068 | 135081 |
| 81C | 8793 | 8807 | 770C | 70673 | 70698 | 1459C | 135069 | 135083 |
| 82C | 8793 | 8806 | 771C | 70675 | 70690 | 1460C | 135073 | 135086 |
| 83C | 8794 | 8807 | 772C | 70675 | 70694 | 1461C | 135968 | 135981 |
| 84C | 8839 | 8857 | 773C | 70675 | 70700 | 1462C | 136242 | 136257 |
| 85C | 8839 | 8856 | 774C | 70677 | 70692 | 1463C | 137120 | 137134 |
| 86C | 8840 | 8856 | 775C | 70677 | 70696 | 1464C | 137887 | 137902 |
| 87C | 8841 | 8858 | 776C | 70677 | 70702 | 1465C | 137887 | 137901 |
| 88C | 8841 | 8857 | 777C | 70679 | 70694 | 1466C | 137888 | 137902 |
| 89C | 8843 | 8858 | 778C | 70679 | 70698 | 1467C | 137889 | 137902 |
| 90C | 8844 | 8858 | 779C | 70681 | 70696 | 1468C | 137890 | 137903 |
| 91C | 8845 | 8858 | 780C | 70681 | 70700 | 1469C | 137890 | 137904 |
| 92C | 8957 | 8979 | 781C | 70683 | 70698 | 1470C | 138036 | 138053 |
| 93C | 8957 | 8977 | 782C | 70683 | 70702 | 1471C | 138036 | 138055 |
| 94C | 8957 | 8973 | 783C | 70685 | 70700 | 1472C | 138036 | 138051 |
| 95C | 8957 | 8975 | 784C | 70687 | 70702 | 1473C | 138036 | 138057 |
| 96C | 8957 | 8970 | 785C | 70741 | 70755 | 1474C | 138039 | 138053 |
| 97C | 8957 | 8974 | 786C | 70773 | 70787 | 1475C | 138039 | 138052 |
| 98C | 8961 | 8977 | 787C | 71566 | 71581 | 1476C | 138040 | 138053 |
| 99C | 8964 | 8977 | 788C | 71566 | 71580 | 1477C | 138040 | 138055 |
| 100C | 8964 | 8979 | 789C | 71567 | 71581 | 1478C | 138070 | 138084 |
| 101C | 8966 | 8979 | 790C | 71568 | 71581 | 1479C | 138424 | 138437 |
| 102C | 8971 | 8984 | 791C | 71573 | 71586 | 1480C | 139405 | 139418 |
| 103C | 9101 | 9118 | 792C | 71673 | 71689 | 1481C | 139522 | 139535 |
| 104C | 9101 | 9116 | 793C | 71673 | 71688 | 1482C | 139741 | 139757 |
| 105C | 9104 | 9118 | 794C | 71673 | 71686 | 1483C | 140443 | 140456 |
| 106C | 9104 | 9117 | 795C | 71673 | 71687 | 1484C | 140444 | 140461 |
| 107C | 9105 | 9118 | 796C | 71674 | 71687 | 1485C | 141404 | 141417 |
| 108C | 9147 | 9161 | 797C | 71675 | 71688 | 1486C | 141419 | 141432 |
| 109C | 9149 | 9162 | 798C | 71676 | 71689 | 1487C | 141527 | 141540 |
| 110C | 9203 | 9216 | 799C | 71736 | 71749 | 1488C | 141528 | 141541 |
| 111C | 9487 | 9500 | 800C | 71834 | 71848 | 1489C | 141818 | 141836 |
| 112C | 9688 | 9705 | 801C | 72220 | 72233 | 1490C | 141970 | 141986 |
| 113C | 9689 | 9705 | 802C | 72705 | 72718 | 1491C | 141970 | 141984 |
| 114C | 9689 | 9706 | 803C | 73266 | 73279 | 1492C | 142574 | 142589 |
| 115C | 9689 | 9703 | 804C | 73272 | 73285 | 1493C | 142578 | 142593 |
| 116C | 9693 | 9708 | 805C | 74100 | 74113 | 1494C | 142582 | 142595 |
| 117C | 9694 | 9708 | 806C | 74105 | 74119 | 1495C | 142583 | 142596 |
| 118C | 9695 | 9708 | 807C | 74788 | 74810 | 1496C | 142583 | 142597 |
| 119C | 9792 | 9806 | 808C | 75094 | 75107 | 1497C | 142616 | 142629 |
| 120C | 9792 | 9805 | 809C | 75158 | 75171 | 1498C | 143152 | 143182 |
| 121C | 10003 | 10016 | 810C | 75311 | 75324 | 1499C | 143232 | 143245 |
| 122C | 10144 | 10157 | 811C | 75413 | 75429 | 1500C | 143312 | 143326 |
| 123C | 10247 | 10262 | 812C | 75413 | 75428 | 1501C | 143453 | 143476 |
| 124C | 10247 | 10260 | 813C | 75413 | 75426 | 1502C | 143656 | 143669 |
| 125C | 10248 | 10262 | 814C | 75413 | 75427 | 1503C | 143684 | 143697 |
| 126C | 10249 | 10262 | 815C | 75414 | 75427 | 1504C | 144528 | 144542 |
| 127C | 10251 | 10266 | 816C | 75415 | 75428 | 1505C | 144618 | 144637 |
| 128C | 10251 | 10264 | 817C | 75416 | 75429 | 1506C | 144645 | 144658 |
| 129C | 10252 | 10266 | 818C | 76104 | 76117 | 1507C | 144672 | 144686 |
| 130C | 10253 | 10266 | 819C | 76948 | 76963 | 1508C | 146564 | 146577 |
| 131C | 10255 | 10270 | 820C | 76949 | 76964 | 1509C | 147703 | 147716 |
| 132C | 10255 | 10268 | 821C | 76951 | 76965 | 1510C | 147861 | 147876 |
| 133C | 10256 | 10270 | 822C | 77149 | 77166 | 1511C | 148164 | 148177 |
| 134C | 10257 | 10270 | 823C | 77149 | 77162 | 1512C | 149164 | 149177 |
| 135C | 10259 | 10274 | 824C | 77151 | 77166 | 1513C | 149463 | 149477 |
| 136C | 10259 | 10272 | 825C | 77159 | 77174 | 1514C | 149546 | 149559 |
| 137C | 10260 | 10274 | 826C | 77159 | 77173 | 1515C | 149547 | 149560 |
| 138C | 10261 | 10274 | 827C | 77160 | 77174 | 1516C | 149795 | 149817 |
| 139C | 10263 | 10278 | 828C | 77161 | 77174 | 1517C | 149823 | 149837 |
| 140C | 10263 | 10276 | 829C | 77162 | 77175 | 1518C | 149871 | 149889 |
| 141C | 10264 | 10278 | 830C | 77162 | 77176 | 1519C | 150320 | 150333 |
| 142C | 10265 | 10278 | 831C | 77789 | 77804 | 1520C | 150422 | 150435 |
| 143C | 10267 | 10280 | 832C | 77789 | 77803 | 1521C | 150422 | 150436 |
| 144C | 10300 | 10319 | 833C | 77790 | 77804 | 1522C | 150423 | 150436 |
| 145C | 10301 | 10315 | 834C | 77791 | 77804 | 1523C | 150424 | 150437 |
| 146C | 10401 | 10414 | 835C | 77796 | 77809 | 1524C | 150424 | 150438 |
| 147C | 10412 | 10425 | 836C | 77915 | 77929 | 1525C | 150426 | 150439 |
| 148C | 10413 | 10426 | 837C | 77970 | 77984 | 1526C | 150432 | 150445 |
| 149C | 10413 | 10427 | 838C | 78289 | 78302 | 1527C | 150513 | 150526 |
| 150C | 10463 | 10476 | 839C | 78968 | 78981 | 1528C | 150732 | 150746 |
| 151C | 10464 | 10486 | 840C | 79018 | 79032 | 1529C | 150732 | 150747 |
| 152C | 10464 | 10480 | 841C | 79486 | 79499 | 1530C | 150735 | 150750 |
| 153C | 10465 | 10481 | 842C | 79584 | 79597 | 1531C | 150745 | 150758 |
| 154C | 10466 | 10482 | 843C | 79589 | 79605 | 1532C | 150955 | 150969 |
| 155C | 10467 | 10483 | 844C | 79589 | 79604 | 1533C | 151053 | 151071 |
| 156C | 10468 | 10484 | 845C | 79589 | 79602 | 1534C | 151054 | 151071 |
| 157C | 10469 | 10486 | 846C | 79589 | 79606 | 1535C | 151159 | 151172 |
| 158C | 10469 | 10485 | 847C | 79589 | 79603 | 1536C | 151257 | 151270 |
| 159C | 10471 | 10486 | 848C | 79590 | 79603 | 1537C | 151262 | 151278 |
| 160C | 10472 | 10486 | 849C | 79590 | 79607 | 1538C | 151262 | 151283 |
| 161C | 10473 | 10486 | 850C | 79591 | 79604 | 1539C | 151262 | 151277 |
| 162C | 10482 | 10496 | 851C | 79592 | 79605 | 1540C | 151262 | 151275 |
| 163C | 10482 | 10495 | 852C | 79593 | 79606 | 1541C | 151262 | 151279 |
| 164C | 10580 | 10594 | 853C | 79594 | 79607 | 1542C | 151262 | 151280 |
| 165C | 10727 | 10744 | 854C | 79607 | 79620 | 1543C | 151262 | 151286 |
| 166C | 10727 | 10746 | 855C | 79987 | 80002 | 1544C | 151262 | 151276 |
| 167C | 10727 | 10742 | 856C | 80000 | 80014 | 1545C | 151262 | 151284 |
| 168C | 10730 | 10744 | 857C | 80012 | 80026 | 1546C | 151263 | 151276 |
| 169C | 10730 | 10743 | 858C | 80012 | 80027 | 1547C | 151264 | 151277 |
| 170C | 10731 | 10744 | 859C | 80012 | 80025 | 1548C | 151265 | 151278 |
| 171C | 10731 | 10746 | 860C | 80099 | 80112 | 1549C | 151266 | 151279 |
| 172C | 10935 | 10950 | 861C | 80345 | 80370 | 1550C | 151267 | 151287 |
| 173C | 10935 | 10949 | 862C | 80346 | 80366 | 1551C | 151267 | 151280 |
| 174C | 10936 | 10950 | 863C | 80347 | 80365 | 1552C | 151268 | 151281 |
| 175C | 10937 | 10950 | 864C | 80347 | 80364 | 1553C | 151269 | 151282 |
| 176C | 10961 | 10974 | 865C | 80348 | 80371 | 1554C | 151270 | 151283 |
| 177C | 11148 | 11161 | 866C | 80348 | 80364 | 1555C | 151270 | 151287 |
| 178C | 11149 | 11164 | 867C | 80349 | 80371 | 1556C | 151271 | 151284 |
| 179C | 11196 | 11209 | 868C | 80349 | 80365 | 1557C | 151272 | 151285 |
| 180C | 11914 | 11927 | 869C | 80350 | 80366 | 1558C | 151273 | 151286 |
| 181C | 11922 | 11937 | 870C | 80351 | 80367 | 1559C | 151274 | 151287 |
| 182C | 11923 | 11937 | 871C | 80352 | 80368 | 1560C | 151450 | 151463 |
| 183C | 11923 | 11936 | 872C | 80353 | 80369 | 1561C | 151471 | 151484 |
| 184C | 11924 | 11937 | 873C | 80354 | 80371 | 1562C | 152267 | 152280 |
| 185C | 11925 | 11938 | 874C | 80354 | 80370 | 1563C | 152377 | 152391 |
| 186C | 12042 | 12062 | 875C | 80356 | 80371 | 1564C | 152866 | 152879 |
| 187C | 12042 | 12058 | 876C | 80357 | 80371 | 1565C | 153678 | 153692 |
| 188C | 12042 | 12060 | 877C | 80358 | 80371 | 1566C | 153681 | 153695 |
| 189C | 12042 | 12055 | 878C | 80472 | 80494 | 1567C | 155687 | 155702 |
| 190C | 12042 | 12059 | 879C | 80472 | 80492 | 1568C | 155846 | 155859 |
| 191C | 12046 | 12062 | 880C | 80472 | 80488 | 1569C | 156250 | 156264 |
| 192C | 12049 | 12062 | 881C | 80472 | 80490 | 1570C | 156607 | 156621 |
| 193C | 12422 | 12437 | 882C | 80472 | 80485 | 1571C | 156655 | 156671 |
| 194C | 12423 | 12437 | 883C | 80472 | 80489 | 1572C | 156722 | 156735 |
| 195C | 12423 | 12436 | 884C | 80476 | 80492 | 1573C | 156772 | 156785 |
| 196C | 12426 | 12441 | 885C | 80479 | 80492 | 1574C | 157707 | 157720 |
| 197C | 12427 | 12441 | 886C | 80479 | 80494 | 1575C | 158831 | 158844 |
| 198C | 12427 | 12440 | 887C | 80481 | 80494 | 1576C | 159712 | 159725 |
| 199C | 12430 | 12445 | 888C | 80486 | 80499 | 1577C | 159717 | 159730 |
| 200C | 12431 | 12445 | 889C | 80486 | 80501 | 1578C | 159737 | 159750 |
| 201C | 12431 | 12444 | 890C | 80489 | 80502 | 1579C | 159850 | 159865 |
| 202C | 12434 | 12449 | 891C | 80617 | 80634 | 1580C | 159852 | 159865 |
| 203C | 12435 | 12449 | 892C | 80617 | 80632 | 1581C | 160455 | 160468 |
| 204C | 12435 | 12448 | 893C | 80620 | 80634 | 1582C | 160944 | 160957 |
| 205C | 12438 | 12453 | 894C | 80620 | 80633 | 1583C | 161633 | 161646 |
| 206C | 12439 | 12453 | 895C | 80621 | 80634 | 1584C | 161733 | 161751 |
| 207C | 12439 | 12452 | 896C | 81065 | 81082 | 1585C | 161760 | 161773 |
| 208C | 12442 | 12457 | 897C | 81068 | 81082 | 1586C | 161778 | 161794 |
| 209C | 12443 | 12457 | 898C | 81325 | 81342 | 1587C | 161780 | 161794 |
| 210C | 12443 | 12456 | 899C | 81325 | 81340 | 1588C | 161780 | 161793 |
| 211C | 12446 | 12462 | 900C | 81328 | 81342 | 1589C | 161939 | 161952 |
| 212C | 12446 | 12461 | 901C | 81328 | 81341 | 1590C | 161939 | 161962 |
| 213C | 12447 | 12461 | 902C | 81329 | 81342 | 1591C | 161940 | 161953 |
| 214C | 12447 | 12460 | 903C | 81458 | 81472 | 1592C | 161941 | 161961 |
| 215C | 12448 | 12462 | 904C | 81755 | 81773 | 1593C | 161941 | 161954 |
| 216C | 12565 | 12581 | 905C | 82369 | 82382 | 1594C | 161942 | 161955 |
| 217C | 12565 | 12578 | 906C | 82810 | 82836 | 1595C | 161943 | 161956 |
| 218C | 12688 | 12705 | 907C | 82811 | 82829 | 1596C | 161944 | 161957 |
| 219C | 12688 | 12701 | 908C | 82811 | 82828 | 1597C | 161944 | 161961 |
| 220C | 12690 | 12705 | 909C | 82812 | 82828 | 1598C | 161945 | 161958 |
| 221C | 12831 | 12844 | 910C | 82813 | 82829 | 1599C | 161946 | 161959 |
| 222C | 12855 | 12872 | 911C | 82814 | 82830 | 1600C | 161947 | 161960 |
| 223C | 12855 | 12870 | 912C | 82815 | 82838 | 1601C | 161948 | 161961 |
| 224C | 12858 | 12872 | 913C | 82815 | 82831 | 1602C | 161948 | 161962 |
| 225C | 12858 | 12871 | 914C | 82816 | 82838 | 1603C | 161950 | 161963 |
| 226C | 12859 | 12872 | 915C | 82816 | 82832 | 1604C | 162202 | 162215 |
| 227C | 13273 | 13287 | 916C | 82817 | 82833 | 1605C | 162968 | 162981 |
| 228C | 13274 | 13287 | 917C | 82818 | 82834 | 1606C | 163017 | 163035 |
| 229C | 13279 | 13292 | 918C | 82819 | 82835 | 1607C | 163018 | 163035 |
| 230C | 13530 | 13543 | 919C | 82820 | 82836 | 1608C | 163044 | 163058 |
| 231C | 13535 | 13551 | 920C | 82821 | 82838 | 1609C | 163230 | 163243 |
| 232C | 13535 | 13550 | 921C | 82821 | 82837 | 1610C | 163231 | 163245 |
| 233C | 13535 | 13548 | 922C | 82823 | 82838 | 1611C | 163240 | 163254 |
| 234C | 13535 | 13549 | 923C | 82824 | 82838 | 1612C | 164790 | 164803 |
| 235C | 13536 | 13549 | 924C | 82825 | 82838 | 1613C | 164957 | 164972 |
| 236C | 13537 | 13550 | 925C | 82922 | 82939 | 1614C | 164960 | 164974 |
| 237C | 13538 | 13551 | 926C | 82922 | 82935 | 1615C | 165108 | 165121 |
| 238C | 13725 | 13738 | 927C | 82924 | 82939 | 1616C | 165760 | 165773 |
| 239C | 13741 | 13755 | 928C | 82932 | 82947 | 1617C | 165778 | 165793 |
| 240C | 13742 | 13755 | 929C | 82932 | 82946 | 1618C | 165796 | 165810 |
| 241C | 13749 | 13762 | 930C | 82933 | 82947 | 1619C | 165796 | 165809 |
| 242C | 13852 | 13866 | 931C | 82934 | 82947 | 1620C | 165808 | 165821 |
| 243C | 13854 | 13867 | 932C | 82935 | 82948 | 1621C | 165890 | 165903 |
| 244C | 13856 | 13871 | 933C | 82935 | 82949 | 1622C | 165913 | 165926 |
| 245C | 13856 | 13869 | 934C | 82950 | 82963 | 1623C | 166498 | 166511 |
| 246C | 13857 | 13871 | 935C | 83081 | 83098 | 1624C | 166963 | 166976 |
| 247C | 13858 | 13871 | 936C | 83081 | 83096 | 1625C | 167057 | 167071 |
| 248C | 14015 | 14030 | 937C | 83084 | 83098 | 1626C | 167698 | 167715 |
| 249C | 14016 | 14030 | 938C | 83084 | 83097 | 1627C | 167797 | 167811 |
| 250C | 14222 | 14235 | 939C | 83085 | 83098 | 1628C | 167798 | 167811 |
| 251C | 14987 | 15001 | 940C | 84001 | 84014 | 1629C | 167914 | 167933 |
| 252C | 15767 | 15784 | 941C | 84827 | 84840 | 1630C | 167916 | 167932 |
| 253C | 15768 | 15784 | 942C | 84838 | 84852 | 1631C | 167916 | 167931 |
| 254C | 15768 | 15783 | 943C | 85047 | 85061 | 1632C | 167916 | 167929 |
| 255C | 15769 | 15784 | 944C | 85263 | 85276 | 1633C | 167916 | 167933 |
| 256C | 15770 | 15784 | 945C | 85278 | 85296 | 1634C | 167916 | 167930 |
| 257C | 15772 | 15788 | 946C | 85333 | 85355 | 1635C | 167917 | 167930 |
| 258C | 15772 | 15787 | 947C | 85385 | 85405 | 1636C | 167918 | 167931 |
| 259C | 15773 | 15788 | 948C | 85717 | 85730 | 1637C | 167919 | 167932 |
| 260C | 15774 | 15788 | 949C | 86342 | 86358 | 1638C | 167920 | 167933 |
| 261C | 15811 | 15825 | 950C | 86991 | 87004 | 1639C | 168129 | 168142 |
| 262C | 15887 | 15901 | 951C | 87120 | 87134 | 1640C | 168206 | 168219 |
| 263C | 15959 | 15974 | 952C | 87121 | 87134 | 1641C | 168215 | 168232 |
| 264C | 16077 | 16095 | 953C | 87145 | 87158 | 1642C | 168218 | 168232 |
| 265C | 16078 | 16095 | 954C | 87748 | 87762 | 1643C | 168222 | 168235 |
| 266C | 16184 | 16198 | 955C | 87749 | 87762 | 1644C | 168223 | 168236 |
| 267C | 17076 | 17090 | 956C | 87759 | 87773 | 1645C | 168223 | 168237 |
| 268C | 17543 | 17556 | 957C | 87759 | 87774 | 1646C | 168332 | 168354 |
| 269C | 18238 | 18256 | 958C | 87759 | 87772 | 1647C | 168332 | 168352 |
| 270C | 18372 | 18389 | 959C | 87874 | 87887 | 1648C | 168332 | 168348 |
| 271C | 18372 | 18387 | 960C | 87893 | 87907 | 1649C | 168332 | 168350 |
| 272C | 18375 | 18389 | 961C | 87894 | 87907 | 1650C | 168332 | 168345 |
| 273C | 18375 | 18388 | 962C | 88005 | 88022 | 1651C | 168332 | 168349 |
| 274C | 18376 | 18389 | 963C | 88005 | 88020 | 1652C | 168336 | 168352 |
| 275C | 18528 | 18541 | 964C | 88008 | 88022 | 1653C | 168339 | 168352 |
| 276C | 19124 | 19142 | 965C | 88008 | 88021 | 1654C | 168339 | 168354 |
| 277C | 19418 | 19436 | 966C | 88009 | 88022 | 1655C | 168341 | 168354 |
| 278C | 19539 | 19552 | 967C | 88410 | 88425 | 1656C | 168346 | 168359 |
| 279C | 19543 | 19557 | 968C | 88410 | 88424 | 1657C | 168346 | 168361 |
| 280C | 19543 | 19556 | 969C | 88411 | 88425 | 1658C | 169624 | 169637 |
| 281C | 19642 | 19657 | 970C | 88412 | 88425 | 1659C | 169634 | 169647 |
| 282C | 19642 | 19656 | 971C | 88417 | 88430 | 1660C | 169950 | 169963 |
| 283C | 19643 | 19657 | 972C | 88555 | 88569 | 1661C | 169993 | 170011 |
| 284C | 19644 | 19657 | 973C | 88556 | 88569 | 1662C | 170013 | 170027 |
| 285C | 19645 | 19658 | 974C | 88563 | 88576 | 1663C | 170747 | 170763 |
| 286C | 19645 | 19659 | 975C | 88858 | 88873 | 1664C | 170786 | 170799 |
| 287C | 19673 | 19686 | 976C | 89771 | 89784 | 1665C | 170832 | 170853 |
| 288C | 20123 | 20136 | 977C | 90601 | 90614 | 1666C | 170857 | 170888 |
| 289C | 20145 | 20158 | 978C | 90960 | 90974 | 1667C | 170890 | 170917 |
| 290C | 20275 | 20288 | 979C | 91239 | 91259 | 1668C | 170952 | 170969 |
| 291C | 20383 | 20396 | 980C | 91273 | 91287 | 1669C | 171124 | 171137 |
| 292C | 20405 | 20418 | 981C | 92313 | 92327 | 1670C | 171205 | 171221 |
| 293C | 20491 | 20504 | 982C | 92407 | 92423 | 1671C | 171548 | 171561 |
| 294C | 20535 | 20548 | 983C | 92457 | 92473 | 1672C | 172068 | 172083 |
| 295C | 20825 | 20845 | 984C | 92468 | 92487 | 1673C | 172378 | 172391 |
| 296C | 20827 | 20865 | 985C | 92636 | 92649 | 1674C | 172774 | 172788 |
| 297C | 20829 | 20867 | 986C | 92649 | 92662 | 1675C | 172857 | 172871 |
| 298C | 20831 | 20869 | 987C | 92687 | 92700 | 1676C | 173032 | 173045 |
| 299C | 20833 | 20871 | 988C | 92703 | 92728 | 1677C | 173037 | 173053 |
| 300C | 20859 | 20873 | 989C | 92709 | 92722 | 1678C | 173037 | 173052 |
| 301C | 20861 | 20875 | 990C | 92713 | 92728 | 1679C | 173037 | 173050 |
| 302C | 21106 | 21123 | 991C | 92738 | 92779 | 1680C | 173037 | 173054 |
| 303C | 21106 | 21121 | 992C | 92853 | 92868 | 1681C | 173037 | 173051 |
| 304C | 21109 | 21123 | 993C | 93263 | 93278 | 1682C | 173038 | 173051 |
| 305C | 21109 | 21122 | 994C | 93489 | 93502 | 1683C | 173038 | 173055 |
| 306C | 21110 | 21123 | 995C | 93490 | 93507 | 1684C | 173039 | 173052 |
| 307C | 21637 | 21651 | 996C | 93924 | 93937 | 1685C | 173040 | 173053 |
| 308C | 21638 | 21651 | 997C | 93953 | 93968 | 1686C | 173041 | 173054 |
| 309C | 21687 | 21705 | 998C | 93992 | 94011 | 1687C | 173042 | 173055 |
| 310C | 21688 | 21705 | 999C | 94190 | 94203 | 1688C | 173175 | 173188 |
| 311C | 21855 | 21868 | 1000C | 94426 | 94439 | 1689C | 173351 | 173364 |
| 312C | 22110 | 22124 | 1001C | 94593 | 94606 | 1690C | 173721 | 173734 |
| 313C | 22111 | 22124 | 1002C | 94594 | 94610 | 1691C | 173753 | 173767 |
| 314C | 22524 | 22537 | 1003C | 95236 | 95252 | 1692C | 173793 | 173806 |
| 315C | 22663 | 22676 | 1004C | 95242 | 95256 | 1693C | 174475 | 174490 |
| 316C | 22682 | 22696 | 1005C | 95245 | 95260 | 1694C | 174477 | 174491 |
| 317C | 22683 | 22696 | 1006C | 95806 | 95819 | 1695C | 174478 | 174492 |
| 318C | 22793 | 22806 | 1007C | 96031 | 96044 | 1696C | 174480 | 174494 |
| 319C | 22794 | 22808 | 1008C | 96294 | 96308 | 1697C | 174754 | 174767 |
| 320C | 22794 | 22807 | 1009C | 96791 | 96807 | 1698C | 175471 | 175484 |
| 321C | 22795 | 22808 | 1010C | 96825 | 96841 | 1699C | 176641 | 176654 |
| 322C | 22963 | 22977 | 1011C | 96826 | 96839 | 1700C | 177161 | 177174 |
| 323C | 23359 | 23372 | 1012C | 96921 | 96943 | 1701C | 177831 | 177844 |
| 324C | 23764 | 23781 | 1013C | 98235 | 98249 | 1702C | 178716 | 178729 |
| 325C | 24025 | 24039 | 1014C | 98271 | 98286 | 1703C | 179143 | 179156 |
| 326C | 24325 | 24339 | 1015C | 99337 | 99354 | 1704C | 179221 | 179235 |
| 327C | 24671 | 24684 | 1016C | 99358 | 99374 | 1705C | 179222 | 179235 |
| 328C | 25357 | 25371 | 1017C | 99438 | 99451 | 1706C | 179223 | 179236 |
| 329C | 25359 | 25374 | 1018C | 99503 | 99516 | 1707C | 179223 | 179237 |
| 330C | 25526 | 25541 | 1019C | 99509 | 99522 | 1708C | 179238 | 179251 |
| 331C | 25527 | 25541 | 1020C | 99520 | 99538 | 1709C | 179369 | 179386 |
| 332C | 25564 | 25578 | 1021C | 99587 | 99603 | 1710C | 179369 | 179388 |
| 333C | 25566 | 25581 | 1022C | 100265 | 100278 | 1711C | 179369 | 179384 |
| 334C | 25614 | 25627 | 1023C | 100374 | 100389 | 1712C | 179369 | 179390 |
| 335C | 26533 | 26546 | 1024C | 100721 | 100734 | 1713C | 179372 | 179386 |
| 336C | 27318 | 27331 | 1025C | 101246 | 101260 | 1714C | 179372 | 179385 |
| 337C | 27589 | 27603 | 1026C | 101442 | 101455 | 1715C | 179373 | 179386 |
| 338C | 28014 | 28028 | 1027C | 101443 | 101456 | 1716C | 179373 | 179388 |
| 339C | 28547 | 28560 | 1028C | 101446 | 101461 | 1717C | 180480 | 180493 |
| 340C | 28677 | 28693 | 1029C | 101449 | 101462 | 1718C | 180610 | 180624 |
| 341C | 28703 | 28733 | 1030C | 101455 | 101473 | 1719C | 180610 | 180625 |
| 342C | 29411 | 29428 | 1031C | 101461 | 101474 | 1720C | 180611 | 180624 |
| 343C | 29415 | 29429 | 1032C | 101461 | 101476 | 1721C | 180635 | 180648 |
| 344C | 29416 | 29429 | 1033C | 101473 | 101486 | 1722C | 180741 | 180758 |
| 345C | 29675 | 29692 | 1034C | 101572 | 101587 | 1723C | 180741 | 180760 |
| 346C | 29678 | 29692 | 1035C | 101572 | 101586 | 1724C | 180746 | 180760 |
| 347C | 29679 | 29692 | 1036C | 101573 | 101587 | 1725C | 180748 | 180761 |
| 348C | 31430 | 31444 | 1037C | 101574 | 101587 | 1726C | 181673 | 181686 |
| 349C | 31886 | 31901 | 1038C | 101575 | 101588 | 1727C | 181673 | 181687 |
| 350C | 32462 | 32475 | 1039C | 101575 | 101589 | 1728C | 181680 | 181693 |
| 351C | 33159 | 33174 | 1040C | 101722 | 101739 | 1729C | 181837 | 181853 |
| 352C | 33161 | 33174 | 1041C | 101722 | 101741 | 1730C | 181840 | 181853 |
| 353C | 33164 | 33178 | 1042C | 101722 | 101737 | 1731C | 181883 | 181896 |
| 354C | 33166 | 33179 | 1043C | 101722 | 101743 | 1732C | 181884 | 181897 |
| 355C | 33266 | 33279 | 1044C | 101725 | 101739 | 1733C | 181953 | 181966 |
| 356C | 33270 | 33285 | 1045C | 101725 | 101738 | 1734C | 181982 | 181998 |
| 357C | 33369 | 33384 | 1046C | 101726 | 101739 | 1735C | 182190 | 182206 |
| 358C | 33369 | 33388 | 1047C | 101726 | 101741 | 1736C | 182190 | 182203 |
| 359C | 33369 | 33383 | 1048C | 101971 | 101984 | 1737C | 182190 | 182207 |
| 360C | 33370 | 33384 | 1049C | 102535 | 102548 | 1738C | 183276 | 183290 |
| 361C | 33370 | 33385 | 1050C | 102560 | 102576 | 1739C | 183278 | 183291 |
| 362C | 33371 | 33384 | 1051C | 102601 | 102621 | 1740C | 183280 | 183295 |
| 363C | 33612 | 33625 | 1052C | 102609 | 102625 | 1741C | 183280 | 183293 |
| 364C | 33613 | 33627 | 1053C | 102618 | 102632 | 1742C | 183281 | 183295 |
| 365C | 33614 | 33627 | 1054C | 102638 | 102655 | 1743C | 183282 | 183295 |
| 366C | 33725 | 33747 | 1055C | 103607 | 103620 | 1744C | 183303 | 183317 |
| 367C | 33725 | 33745 | 1056C | 103730 | 103743 | 1745C | 183496 | 183509 |
| 368C | 33725 | 33741 | 1057C | 103768 | 103781 | 1746C | 183512 | 183525 |
| 369C | 33725 | 33743 | 1058C | 103824 | 103839 | 1747C | 183512 | 183526 |
| 370C | 33725 | 33738 | 1059C | 104275 | 104313 | 1748C | 183775 | 183788 |
| 371C | 33725 | 33742 | 1060C | 104275 | 104290 | 1749C | 183795 | 183808 |
| 372C | 33729 | 33745 | 1061C | 104275 | 104294 | 1750C | 184033 | 184046 |
| 373C | 33732 | 33745 | 1062C | 104275 | 104300 | 1751C | 184034 | 184051 |
| 374C | 33732 | 33747 | 1063C | 104276 | 104313 | 1752C | 184034 | 184050 |
| 375C | 33734 | 33747 | 1064C | 104277 | 104315 | 1753C | 184036 | 184051 |
| 376C | 33739 | 33752 | 1065C | 104277 | 104292 | 1754C | 184037 | 184051 |
| 377C | 33771 | 33786 | 1066C | 104277 | 104296 | 1755C | 184038 | 184051 |
| 378C | 33773 | 33791 | 1067C | 104277 | 104302 | 1756C | 184048 | 184062 |
| 379C | 33773 | 33790 | 1068C | 104278 | 104315 | 1757C | 184048 | 184063 |
| 380C | 33774 | 33797 | 1069C | 104279 | 104317 | 1758C | 184048 | 184061 |
| 381C | 33774 | 33790 | 1070C | 104279 | 104294 | 1759C | 184134 | 184149 |
| 382C | 33775 | 33797 | 1071C | 104279 | 104298 | 1760C | 184135 | 184149 |
| 383C | 33775 | 33791 | 1072C | 104279 | 104304 | 1761C | 184135 | 184148 |
| 384C | 33776 | 33792 | 1073C | 104280 | 104317 | 1762C | 184200 | 184214 |
| 385C | 33777 | 33793 | 1074C | 104281 | 104319 | 1763C | 184286 | 184303 |
| 386C | 33778 | 33794 | 1075C | 104281 | 104296 | 1764C | 184286 | 184301 |
| 387C | 33779 | 33795 | 1076C | 104281 | 104300 | 1765C | 184289 | 184303 |
| 388C | 33780 | 33797 | 1077C | 104281 | 104306 | 1766C | 184289 | 184302 |
| 389C | 33780 | 33796 | 1078C | 104282 | 104319 | 1767C | 184290 | 184303 |
| 390C | 33782 | 33797 | 1079C | 104283 | 104298 | 1768C | 185258 | 185271 |
| 391C | 33783 | 33797 | 1080C | 104283 | 104302 | 1769C | 185486 | 185501 |
| 392C | 33784 | 33797 | 1081C | 104283 | 104308 | 1770C | 185487 | 185524 |
| 393C | 33785 | 33799 | 1082C | 104285 | 104300 | 1771C | 185488 | 185526 |
| 394C | 33785 | 33798 | 1083C | 104285 | 104304 | 1772C | 185488 | 185503 |
| 395C | 34721 | 34737 | 1084C | 104285 | 104310 | 1773C | 185488 | 185507 |
| 396C | 34721 | 34735 | 1085C | 104287 | 104302 | 1774C | 185488 | 185513 |
| 397C | 34724 | 34738 | 1086C | 104287 | 104306 | 1775C | 185489 | 185526 |
| 398C | 34725 | 34738 | 1087C | 104287 | 104312 | 1776C | 185490 | 185528 |
| 399C | 34829 | 34843 | 1088C | 104289 | 104304 | 1777C | 185490 | 185505 |
| 400C | 34830 | 34843 | 1089C | 104289 | 104308 | 1778C | 185490 | 185509 |
| 401C | 34845 | 34858 | 1090C | 104289 | 104314 | 1779C | 185490 | 185515 |
| 402C | 34850 | 34863 | 1091C | 104291 | 104306 | 1780C | 185491 | 185528 |
| 403C | 34962 | 34975 | 1092C | 104291 | 104310 | 1781C | 185492 | 185530 |
| 404C | 34979 | 34996 | 1093C | 104291 | 104316 | 1782C | 185492 | 185507 |
| 405C | 34979 | 34994 | 1094C | 104293 | 104308 | 1783C | 185492 | 185511 |
| 406C | 34982 | 34996 | 1095C | 104293 | 104312 | 1784C | 185492 | 185517 |
| 407C | 34982 | 34995 | 1096C | 104293 | 104318 | 1785C | 185493 | 185530 |
| 408C | 34983 | 34996 | 1097C | 104295 | 104310 | 1786C | 185494 | 185532 |
| 409C | 36134 | 36150 | 1098C | 104295 | 104314 | 1787C | 185494 | 185509 |
| 410C | 36134 | 36151 | 1099C | 104295 | 104320 | 1788C | 185494 | 185513 |
| 411C | 36134 | 36148 | 1100C | 104297 | 104312 | 1789C | 185494 | 185519 |
| 412C | 36137 | 36152 | 1101C | 104297 | 104316 | 1790C | 185495 | 185532 |
| 413C | 36139 | 36154 | 1102C | 104299 | 104314 | 1791C | 185496 | 185534 |
| 414C | 36140 | 36153 | 1103C | 104299 | 104318 | 1792C | 185496 | 185511 |
| 415C | 36142 | 36156 | 1104C | 104301 | 104316 | 1793C | 185496 | 185515 |
| 416C | 36154 | 36167 | 1105C | 104301 | 104320 | 1794C | 185496 | 185521 |
| 417C | 37221 | 37236 | 1106C | 104303 | 104318 | 1795C | 185497 | 185534 |
| 418C | 37221 | 37235 | 1107C | 104305 | 104320 | 1796C | 185498 | 185536 |
| 419C | 37222 | 37236 | 1108C | 104515 | 104529 | 1797C | 185498 | 185513 |
| 420C | 37223 | 37236 | 1109C | 104526 | 104539 | 1798C | 185498 | 185517 |
| 421C | 37228 | 37241 | 1110C | 104526 | 104541 | 1799C | 185498 | 185523 |
| 422C | 37373 | 37386 | 1111C | 104529 | 104543 | 1800C | 185499 | 185536 |
| 423C | 37639 | 37652 | 1112C | 104531 | 104545 | 1801C | 185500 | 185538 |
| 424C | 37965 | 37978 | 1113C | 104556 | 104574 | 1802C | 185500 | 185515 |
| 425C | 38276 | 38292 | 1114C | 104557 | 104574 | 1803C | 185500 | 185519 |
| 426C | 39112 | 39125 | 1115C | 104595 | 104615 | 1804C | 185500 | 185525 |
| 427C | 39195 | 39217 | 1116C | 104596 | 104614 | 1805C | 185501 | 185538 |
| 428C | 39221 | 39236 | 1117C | 104596 | 104613 | 1806C | 185502 | 185517 |
| 429C | 39238 | 39254 | 1118C | 104597 | 104613 | 1807C | 185502 | 185521 |
| 430C | 39259 | 39287 | 1119C | 104598 | 104614 | 1808C | 185502 | 185527 |
| 431C | 39307 | 39323 | 1120C | 104599 | 104616 | 1809C | 185504 | 185519 |
| 432C | 39354 | 39368 | 1121C | 104599 | 104615 | 1810C | 185504 | 185523 |
| 433C | 39520 | 39540 | 1122C | 104601 | 104616 | 1811C | 185504 | 185529 |
| 434C | 39563 | 39582 | 1123C | 104602 | 104616 | 1812C | 185506 | 185521 |
| 435C | 39591 | 39646 | 1124C | 104603 | 104616 | 1813C | 185506 | 185525 |
| 436C | 39641 | 39665 | 1125C | 104707 | 104722 | 1814C | 185506 | 185531 |
| 437C | 39653 | 39667 | 1126C | 104707 | 104721 | 1815C | 185508 | 185523 |
| 438C | 39654 | 39667 | 1127C | 104708 | 104722 | 1816C | 185508 | 185527 |
| 439C | 39665 | 39680 | 1128C | 104709 | 104722 | 1817C | 185508 | 185533 |
| 440C | 39667 | 39680 | 1129C | 104710 | 104723 | 1818C | 185510 | 185525 |
| 441C | 39676 | 39689 | 1130C | 104710 | 104724 | 1819C | 185510 | 185529 |
| 442C | 39687 | 39704 | 1131C | 104980 | 104997 | 1820C | 185510 | 185535 |
| 443C | 39749 | 39766 | 1132C | 105142 | 105155 | 1821C | 185512 | 185527 |
| 444C | 39881 | 39895 | 1133C | 105227 | 105241 | 1822C | 185512 | 185531 |
| 445C | 40315 | 40332 | 1134C | 105634 | 105647 | 1823C | 185512 | 185537 |
| 446C | 40326 | 40339 | 1135C | 105935 | 105948 | 1824C | 185514 | 185529 |
| 447C | 40327 | 40340 | 1136C | 106055 | 106068 | 1825C | 185514 | 185533 |
| 448C | 40725 | 40739 | 1137C | 106749 | 106762 | 1826C | 185514 | 185539 |
| 449C | 40753 | 40766 | 1138C | 108053 | 108067 | 1827C | 185516 | 185531 |
| 450C | 40828 | 40845 | 1139C | 108079 | 108093 | 1828C | 185516 | 185535 |
| 451C | 40833 | 40849 | 1140C | 108111 | 108124 | 1829C | 185518 | 185533 |
| 452C | 40847 | 40861 | 1141C | 108193 | 108206 | 1830C | 185518 | 185537 |
| 453C | 40847 | 40860 | 1142C | 108242 | 108260 | 1831C | 185520 | 185535 |
| 454C | 40933 | 40948 | 1143C | 108242 | 108267 | 1832C | 185520 | 185539 |
| 455C | 40934 | 40948 | 1144C | 108242 | 108259 | 1833C | 185522 | 185537 |
| 456C | 40934 | 40947 | 1145C | 108243 | 108259 | 1834C | 185524 | 185539 |
| 457C | 41081 | 41098 | 1146C | 108244 | 108267 | 1835C | 185786 | 185812 |
| 458C | 41081 | 41096 | 1147C | 108244 | 108260 | 1836C | 186089 | 186103 |
| 459C | 41084 | 41098 | 1148C | 108245 | 108267 | 1837C | 187455 | 187468 |
| 460C | 41084 | 41097 | 1149C | 108245 | 108261 | 1838C | 187536 | 187549 |
| 461C | 41085 | 41098 | 1150C | 108246 | 108262 | 1839C | 187570 | 187583 |
| 462C | 41813 | 41826 | 1151C | 108247 | 108263 | 1840C | 187594 | 187607 |
| 463C | 42035 | 42048 | 1152C | 108248 | 108264 | 1841C | 187700 | 187715 |
| 464C | 42046 | 42060 | 1153C | 108249 | 108265 | 1842C | 187702 | 187715 |
| 465C | 42394 | 42407 | 1154C | 108250 | 108267 | 1843C | 187705 | 187719 |
| 466C | 42784 | 42805 | 1155C | 108250 | 108266 | 1844C | 187707 | 187720 |
| 467C | 42815 | 42828 | 1156C | 108252 | 108267 | 1845C | 187710 | 187724 |
| 468C | 43505 | 43518 | 1157C | 108253 | 108267 | 1846C | 187712 | 187725 |
| 469C | 44251 | 44264 | 1158C | 108254 | 108267 | 1847C | 187715 | 187729 |
| 470C | 44252 | 44269 | 1159C | 108315 | 108329 | 1848C | 189197 | 189211 |
| 471C | 44252 | 44268 | 1160C | 109578 | 109592 | 1849C | 189201 | 189215 |
| 472C | 44254 | 44269 | 1161C | 109779 | 109799 | 1850C | 189202 | 189216 |
| 473C | 44255 | 44269 | 1162C | 109779 | 109792 | 1851C | 189203 | 189216 |
| 474C | 44256 | 44269 | 1163C | 109780 | 109793 | 1852C | 189234 | 189248 |
| 475C | 44363 | 44378 | 1164C | 109781 | 109794 | 1853C | 189235 | 189248 |
| 476C | 44363 | 44377 | 1165C | 109782 | 109795 | 1854C | 189241 | 189255 |
| 477C | 44364 | 44378 | 1166C | 109782 | 109799 | 1855C | 189242 | 189255 |
| 478C | 44365 | 44378 | 1167C | 109783 | 109796 | 1856C | 189328 | 189341 |
| 479C | 44366 | 44379 | 1168C | 109784 | 109797 | 1857C | 189353 | 189366 |
| 480C | 44366 | 44380 | 1169C | 109785 | 109798 | 1858C | 189388 | 189402 |
| 481C | 44381 | 44394 | 1170C | 109786 | 109799 | 1859C | 189389 | 189402 |
| 482C | 44693 | 44706 | 1171C | 109787 | 109800 | 1860C | 189404 | 189417 |
| 483C | 44886 | 44899 | 1172C | 109858 | 109871 | 1861C | 189436 | 189449 |
| 484C | 45063 | 45076 | 1173C | 109884 | 109901 | 1862C | 189484 | 189497 |
| 485C | 45550 | 45563 | 1174C | 109885 | 109902 | 1863C | 189509 | 189522 |
| 486C | 45566 | 45579 | 1175C | 109885 | 109901 | 1864C | 189524 | 189537 |
| 487C | 46504 | 46518 | 1176C | 109887 | 109902 | 1865C | 189616 | 189629 |
| 488C | 46504 | 46517 | 1177C | 109888 | 109902 | 1866C | 189679 | 189692 |
| 489C | 47117 | 47130 | 1178C | 109889 | 109902 | 1867C | 189727 | 189741 |
| 490C | 47761 | 47774 | 1179C | 109899 | 109913 | 1868C | 189728 | 189741 |
| 491C | 48059 | 48076 | 1180C | 109899 | 109914 | 1869C | 189746 | 189760 |
| 492C | 48059 | 48074 | 1181C | 109899 | 109912 | 1870C | 189768 | 189781 |
| 493C | 48062 | 48076 | 1182C | 109985 | 110000 | 1871C | 189850 | 189864 |
| 494C | 48062 | 48075 | 1183C | 109986 | 110000 | 1872C | 189871 | 189884 |
| 495C | 48063 | 48076 | 1184C | 109986 | 109999 | 1873C | 189903 | 189917 |
| 496C | 51324 | 51337 | 1185C | 110032 | 110047 | 1874C | 189904 | 189917 |
| 497C | 51451 | 51464 | 1186C | 110033 | 110047 | 1875C | 189999 | 190012 |
| 498C | 51699 | 51713 | 1187C | 110034 | 110047 | 1876C | 190003 | 190016 |
| 499C | 51703 | 51718 | 1188C | 110054 | 110067 | 1877C | 190050 | 190064 |
| 500C | 51704 | 51718 | 1189C | 110130 | 110144 | 1878C | 190094 | 190107 |
| 501C | 51706 | 51721 | 1190C | 110131 | 110144 | 1879C | 190105 | 190120 |
| 502C | 51709 | 51724 | 1191C | 110144 | 110161 | 1880C | 190110 | 190123 |
| 503C | 51711 | 51724 | 1192C | 110144 | 110159 | 1881C | 190452 | 190465 |
| 504C | 51714 | 51728 | 1193C | 110147 | 110161 | 1882C | 190911 | 190931 |
| 505C | 51716 | 51730 | 1194C | 110147 | 110160 | 1883C | 190977 | 190991 |
| 506C | 51716 | 51729 | 1195C | 110148 | 110161 | 1884C | 190986 | 190999 |
| 507C | 52657 | 52671 | 1196C | 111693 | 111709 | 1885C | 191022 | 191035 |
| 508C | 52685 | 52698 | 1197C | 111914 | 111927 | 1886C | 191066 | 191096 |
| 509C | 52804 | 52817 | 1198C | 111978 | 111991 | 1887C | 191110 | 191124 |
| 510C | 52901 | 52918 | 1199C | 112522 | 112535 | 1888C | 191533 | 191550 |
| 511C | 53045 | 53058 | 1200C | 113014 | 113028 | 1889C | 191685 | 191701 |
| 512C | 53050 | 53063 | 1201C | 113014 | 113027 | 1890C | 192166 | 192179 |
| 513C | 53499 | 53512 | 1202C | 113017 | 113033 | 1891C | 192229 | 192248 |
| 514C | 53593 | 53606 | 1203C | 113017 | 113032 | 1892C | 192267 | 192280 |
| 515C | 53598 | 53611 | 1204C | 113018 | 113032 | 1893C | 192368 | 192381 |
| 516C | 53848 | 53861 | 1205C | 113018 | 113031 | 1894C | 193000 | 193016 |
| 517C | 53853 | 53869 | 1206C | 113019 | 113033 | 1895C | 193002 | 193016 |
| 518C | 53853 | 53874 | 1207C | 113149 | 113162 | 1896C | 193004 | 193017 |
| 519C | 53853 | 53868 | 1208C | 113165 | 113180 | 1897C | 193684 | 193697 |
| 520C | 53853 | 53866 | 1209C | 113639 | 113652 | 1898C | 193775 | 193788 |
| 521C | 53853 | 53870 | 1210C | 113972 | 113985 | 1899C | 194043 | 194056 |
| 522C | 53853 | 53871 | 1211C | 113977 | 113990 | 1900C | 194115 | 194128 |
| 523C | 53853 | 53867 | 1212C | 114427 | 114444 | 1901C | 194211 | 194224 |
| 524C | 53854 | 53867 | 1213C | 114505 | 114520 | 1902C | 194342 | 194355 |
| 525C | 53855 | 53868 | 1214C | 114506 | 114519 | 1903C | 194963 | 194977 |
| 526C | 53856 | 53869 | 1215C | 114508 | 114522 | 1904C | 195208 | 195221 |
| 527C | 53857 | 53870 | 1216C | 114607 | 114624 | 1905C | 196504 | 196517 |
| 528C | 53858 | 53871 | 1217C | 114610 | 114624 | 1906C | 196510 | 196523 |
| 529C | 53859 | 53872 | 1218C | 114611 | 114624 | 1907C | 197407 | 197420 |
| 530C | 53860 | 53873 | 1219C | 114625 | 114638 | 1908C | 197546 | 197562 |
| 531C | 53861 | 53874 | 1220C | 114726 | 114739 | 1909C | 198107 | 198121 |
| 532C | 56431 | 56451 | 1221C | 114858 | 114871 | 1910C | 198108 | 198121 |
| 533C | 56431 | 56447 | 1222C | 114953 | 114966 | 1911C | 198132 | 198145 |
| 534C | 56432 | 56448 | 1223C | 114958 | 114974 | 1912C | 198236 | 198249 |
| 535C | 56433 | 56449 | 1224C | 114958 | 114973 | 1913C | 198236 | 198253 |
| 536C | 56434 | 56451 | 1225C | 114958 | 114971 | 1914C | 198237 | 198250 |
| 537C | 56434 | 56450 | 1226C | 114958 | 114975 | 1915C | 198238 | 198251 |
| 538C | 56436 | 56451 | 1227C | 114958 | 114976 | 1916C | 198239 | 198252 |
| 539C | 56438 | 56453 | 1228C | 114958 | 114972 | 1917C | 198240 | 198253 |
| 540C | 56439 | 56453 | 1229C | 114959 | 114972 | 1918C | 198241 | 198254 |
| 541C | 56439 | 56452 | 1230C | 114960 | 114973 | 1919C | 199001 | 199014 |
| 542C | 56440 | 56453 | 1231C | 114960 | 114977 | 1920C | 199399 | 199416 |
| 543C | 56689 | 56702 | 1232C | 114961 | 114974 | 1921C | 199433 | 199447 |
| 544C | 56888 | 56902 | 1233C | 114962 | 114975 | 1922C | 199982 | 199995 |
| 545C | 57519 | 57532 | 1234C | 114963 | 114976 | 1923C | 200105 | 200118 |
| 546C | 57629 | 57643 | 1235C | 114964 | 114977 | 1924C | 201599 | 201612 |
| 547C | 57630 | 57643 | 1236C | 114964 | 114978 | 1925C | 201698 | 201721 |
| 548C | 57631 | 57645 | 1237C | 114966 | 114979 | 1926C | 201737 | 201750 |
| 549C | 57843 | 57856 | 1238C | 115114 | 115130 | 1927C | 201752 | 201765 |
| 550C | 57843 | 57858 | 1239C | 115139 | 115152 | 1928C | 201942 | 201955 |
| 551C | 57847 | 57865 | 1240C | 115216 | 115230 | 1929C | 202723 | 202736 |
| 552C | 57848 | 57865 | 1241C | 115362 | 115383 | 1930C | 202809 | 202822 |
| 553C | 57849 | 57862 | 1242C | 116149 | 116162 | 1931C | 203322 | 203339 |
| 554C | 57849 | 57864 | 1243C | 117192 | 117205 | 1932C | 203595 | 203610 |
| 555C | 57854 | 57868 | 1244C | 117205 | 117218 | 1933C | 203698 | 203711 |
| 556C | 57865 | 57879 | 1245C | 117205 | 117220 | 1934C | 205286 | 205301 |
| 557C | 57865 | 57878 | 1246C | 117207 | 117220 | 1935C | 205288 | 205301 |
| 558C | 58001 | 58015 | 1247C | 117212 | 117225 | 1936C | 205509 | 205526 |
| 559C | 58001 | 58014 | 1248C | 117252 | 117265 | 1937C | 205509 | 205524 |
| 560C | 58112 | 58129 | 1249C | 117355 | 117372 | 1938C | 205512 | 205526 |
| 561C | 58112 | 58127 | 1250C | 117355 | 117370 | 1939C | 205512 | 205525 |
| 562C | 58115 | 58129 | 1251C | 117358 | 117372 | 1940C | 205513 | 205526 |
| 563C | 58115 | 58128 | 1252C | 117358 | 117371 | 1941C | 205773 | 205790 |
| 564C | 58116 | 58129 | 1253C | 117359 | 117372 | 1942C | 205773 | 205786 |
| 565C | 58944 | 58958 | 1254C | 117379 | 117392 | 1943C | 205775 | 205790 |
| 566C | 58946 | 58959 | 1255C | 117420 | 117434 | 1944C | 205918 | 205933 |
| 567C | 58947 | 58962 | 1256C | 117420 | 117433 | 1945C | 205921 | 205955 |
| 568C | 58948 | 58962 | 1257C | 117536 | 117549 | 1946C | 205942 | 205956 |
| 569C | 58949 | 58962 | 1258C | 117692 | 117706 | 1947C | 205943 | 205957 |
| 570C | 59054 | 59069 | 1259C | 117692 | 117705 | 1948C | 206118 | 206131 |
| 571C | 59054 | 59068 | 1260C | 117929 | 117943 | 1949C | 206852 | 206866 |
| 572C | 59055 | 59069 | 1261C | 117931 | 117944 | 1950C | 206903 | 206922 |
| 573C | 59056 | 59069 | 1262C | 119402 | 119415 | 1951C | 207326 | 207340 |
| 574C | 59057 | 59070 | 1263C | 119403 | 119416 | 1952C | 207388 | 207401 |
| 575C | 59057 | 59071 | 1264C | 119521 | 119536 | 1953C | 207731 | 207744 |
| 576C | 59072 | 59085 | 1265C | 119521 | 119535 | 1954C | 207800 | 207814 |
| 577C | 59370 | 59385 | 1266C | 119522 | 119536 | 1955C | 208172 | 208188 |
| 578C | 59370 | 59384 | 1267C | 119523 | 119536 | 1956C | 208202 | 208215 |
| 579C | 59371 | 59385 | 1268C | 119524 | 119537 | 1957C | 208217 | 208230 |
| 580C | 59372 | 59385 | 1269C | 119524 | 119538 | 1958C | 208256 | 208281 |
| 581C | 59373 | 59386 | 1270C | 120110 | 120123 | 1959C | 208329 | 208343 |
| 582C | 59373 | 59387 | 1271C | 120916 | 120929 | 1960C | 208573 | 208588 |
| 583C | 59390 | 59403 | 1272C | 120921 | 120934 | 1961C | 209367 | 209380 |
| 584C | 59525 | 59538 | 1273C | 121153 | 121166 | 1962C | 209718 | 209731 |
| 585C | 59569 | 59582 | 1274C | 121533 | 121546 | 1963C | 210001 | 210015 |
| 586C | 59689 | 59705 | 1275C | 121541 | 121560 | 1964C | 210175 | 210191 |
| 587C | 59689 | 59707 | 1276C | 121594 | 121614 | 1965C | 210235 | 210248 |
| 588C | 59689 | 59702 | 1277C | 121616 | 121629 | 1966C | 210259 | 210276 |
| 589C | 59689 | 59706 | 1278C | 121679 | 121698 | 1967C | 210278 | 210296 |
| 590C | 59834 | 59851 | 1279C | 121760 | 121775 | 1968C | 210868 | 210881 |
| 591C | 59834 | 59849 | 1280C | 121853 | 121873 | 1969C | 210869 | 210884 |
| 592C | 59837 | 59851 | 1281C | 121961 | 121977 | 1970C | 210983 | 210996 |
| 593C | 59837 | 59850 | 1282C | 122017 | 122030 | 1971C | 210988 | 211001 |
| 594C | 59838 | 59851 | 1283C | 122070 | 122090 | 1972C | 211127 | 211141 |
| 595C | 60325 | 60338 | 1284C | 122124 | 122137 | 1973C | 211128 | 211141 |
| 596C | 60780 | 60794 | 1285C | 122443 | 122456 | 1974C | 211135 | 211148 |
| 597C | 60943 | 60958 | 1286C | 122713 | 122726 | 1975C | 211237 | 211253 |
| 598C | 60943 | 60957 | 1287C | 123690 | 123705 | 1976C | 211237 | 211258 |
| 599C | 60944 | 60958 | 1288C | 123692 | 123705 | 1977C | 211237 | 211252 |
| 600C | 60945 | 60958 | 1289C | 123793 | 123806 | 1978C | 211237 | 211250 |
| 601C | 60950 | 60963 | 1290C | 123921 | 123937 | 1979C | 211237 | 211254 |
| 602C | 60999 | 61017 | 1291C | 123924 | 123937 | 1980C | 211237 | 211255 |
| 603C | 61000 | 61017 | 1292C | 124080 | 124093 | 1981C | 211237 | 211251 |
| 604C | 61216 | 61231 | 1293C | 124136 | 124150 | 1982C | 211237 | 211259 |
| 605C | 61216 | 61229 | 1294C | 124483 | 124497 | 1983C | 211238 | 211251 |
| 606C | 61216 | 61230 | 1295C | 124551 | 124564 | 1984C | 211239 | 211252 |
| 607C | 61217 | 61230 | 1296C | 125444 | 125457 | 1985C | 211240 | 211260 |
| 608C | 61218 | 61231 | 1297C | 125480 | 125493 | 1986C | 211240 | 211253 |
| 609C | 61219 | 61232 | 1298C | 125880 | 125893 | 1987C | 211241 | 211254 |
| 610C | 61220 | 61233 | 1299C | 126098 | 126111 | 1988C | 211242 | 211255 |
| 611C | 61253 | 61266 | 1300C | 126100 | 126113 | 1989C | 211243 | 211256 |
| 612C | 61258 | 61271 | 1301C | 126100 | 126114 | 1990C | 211243 | 211260 |
| 613C | 61412 | 61425 | 1302C | 126102 | 126117 | 1991C | 211244 | 211257 |
| 614C | 61501 | 61514 | 1303C | 126102 | 126121 | 1992C | 211245 | 211258 |
| 615C | 61506 | 61519 | 1304C | 126107 | 126120 | 1993C | 211246 | 211259 |
| 616C | 62148 | 62161 | 1305C | 126705 | 126719 | 1994C | 211247 | 211260 |
| 617C | 62171 | 62184 | 1306C | 126705 | 126720 | 1995C | 212059 | 212081 |
| 618C | 62197 | 62215 | 1307C | 126709 | 126722 | 1996C | 212122 | 212138 |
| 619C | 62198 | 62215 | 1308C | 126714 | 126730 | 1997C | 212186 | 212199 |
| 620C | 62420 | 62434 | 1309C | 126714 | 126735 | 1998C | 212409 | 212422 |
| 621C | 62422 | 62438 | 1310C | 126714 | 126729 | 1999C | 212424 | 212440 |
| 622C | 62424 | 62438 | 1311C | 126714 | 126727 | 2000C | 212481 | 212497 |
| 623C | 64142 | 64155 | 1312C | 126714 | 126731 | 2001C | 212742 | 212755 |
| 624C | 64276 | 64290 | 1313C | 126714 | 126732 | 2002C | 213194 | 213207 |
| 625C | 64277 | 64290 | 1314C | 126714 | 126740 | 2003C | 213194 | 213209 |
| 626C | 64301 | 64314 | 1315C | 126714 | 126738 | 2004C | 213196 | 213216 |
| 627C | 64401 | 64417 | 1316C | 126714 | 126728 | 2005C | 213197 | 213215 |
| 628C | 64401 | 64422 | 1317C | 126714 | 126736 | 2006C | 213197 | 213214 |
| 629C | 64401 | 64416 | 1318C | 126715 | 126728 | 2007C | 213197 | 213219 |
| 630C | 64401 | 64414 | 1319C | 126716 | 126729 | 2008C | 213198 | 213214 |
| 631C | 64401 | 64428 | 1320C | 126717 | 126730 | 2009C | 213199 | 213215 |
| 632C | 64401 | 64418 | 1321C | 126718 | 126731 | 2010C | 213200 | 213216 |
| 633C | 64401 | 64419 | 1322C | 126719 | 126732 | 2011C | 213201 | 213217 |
| 634C | 64401 | 64427 | 1323C | 126720 | 126733 | 2012C | 213202 | 213219 |
| 635C | 64401 | 64425 | 1324C | 126721 | 126734 | 2013C | 213202 | 213218 |
| 636C | 64401 | 64415 | 1325C | 126722 | 126735 | 2014C | 213204 | 213219 |
| 637C | 64401 | 64423 | 1326C | 126723 | 126736 | 2015C | 213205 | 213219 |
| 638C | 64402 | 64415 | 1327C | 126724 | 126737 | 2016C | 213206 | 213219 |
| 639C | 64403 | 64416 | 1328C | 126725 | 126738 | 2017C | 213207 | 213220 |
| 640C | 64404 | 64417 | 1329C | 126726 | 126739 | 2018C | 213220 | 213234 |
| 641C | 64405 | 64418 | 1330C | 126727 | 126740 | 2019C | 213220 | 213235 |
| 642C | 64406 | 64419 | 1331C | 128160 | 128173 | 2020C | 213220 | 213233 |
| 643C | 64407 | 64420 | 1332C | 128429 | 128442 | 2021C | 213470 | 213487 |
| 644C | 64408 | 64421 | 1333C | 128548 | 128561 | 2022C | 213470 | 213485 |
| 645C | 64409 | 64429 | 1334C | 128902 | 128928 | 2023C | 213473 | 213487 |
| 646C | 64409 | 64422 | 1335C | 129245 | 129263 | 2024C | 213473 | 213486 |
| 647C | 64410 | 64423 | 1336C | 129722 | 129736 | 2025C | 213474 | 213487 |
| 648C | 64411 | 64424 | 1337C | 130321 | 130334 | 2026C | 213903 | 213917 |
| 649C | 64412 | 64425 | 1338C | 130407 | 130420 | 2027C | 214421 | 214434 |
| 650C | 64412 | 64429 | 1339C | 130414 | 130427 | 2028C | 214656 | 214669 |
| 651C | 64413 | 64426 | 1340C | 130519 | 130533 | 2029C | 215447 | 215460 |
| 652C | 64414 | 64427 | 1341C | 130520 | 130533 | 2030C | 215447 | 215462 |
| 653C | 64415 | 64428 | 1342C | 130521 | 130534 | 2031C | 215452 | 215469 |
| 654C | 64416 | 64429 | 1343C | 130818 | 130835 | 2032C | 215453 | 215466 |
| 655C | 64417 | 64430 | 1344C | 130819 | 130832 | 2033C | 215453 | 215468 |
| 656C | 65366 | 65380 | 1345C | 130819 | 130834 | 2034C | 215458 | 215472 |
| 657C | 65371 | 65385 | 1346C | 130824 | 130838 | 2035C | 215458 | 215473 |
| 658C | 65376 | 65390 | 1347C | 130824 | 130839 | 2036C | 215459 | 215476 |
| 659C | 65381 | 65395 | 1348C | 130825 | 130842 | 2037C | 215460 | 215474 |
| 660C | 65386 | 65400 | 1349C | 130826 | 130840 | 2038C | 215461 | 215477 |
| 661C | 65484 | 65499 | 1350C | 130827 | 130843 | 2039C | 215461 | 215478 |
| 662C | 65485 | 65499 | 1351C | 130827 | 130844 | 2040C | 215461 | 215475 |
| 663C | 65485 | 65498 | 1352C | 130827 | 130841 | 2041C | 215464 | 215479 |
| 664C | 65492 | 65506 | 1353C | 130830 | 130845 | 2042C | 215465 | 215479 |
| 665C | 65493 | 65506 | 1354C | 130831 | 130845 | 2043C | 215466 | 215479 |
| 666C | 65635 | 65652 | 1355C | 130832 | 130845 | 2044C | 215573 | 215588 |
| 667C | 65635 | 65650 | 1356C | 130950 | 130966 | 2045C | 215573 | 215587 |
| 668C | 65638 | 65652 | 1357C | 130950 | 130963 | 2046C | 215574 | 215588 |
| 669C | 65638 | 65651 | 1358C | 130950 | 130967 | 2047C | 215575 | 215588 |
| 670C | 65639 | 65652 | 1359C | 131305 | 131318 | 2048C | 215576 | 215589 |
| 671C | 65670 | 65683 | 1360C | 131561 | 131577 | 2049C | 215576 | 215590 |
| 672C | 65709 | 65735 | 1361C | 131561 | 131582 | 2050C | 215591 | 215604 |
| 673C | 65710 | 65728 | 1362C | 131561 | 131576 | 2051C | 216217 | 216230 |
| 674C | 65710 | 65727 | 1363C | 131561 | 131574 | 2052C | 216885 | 216898 |
| 675C | 65711 | 65727 | 1364C | 131561 | 131578 | 2053C | 217158 | 217172 |
| 676C | 65712 | 65728 | 1365C | 131561 | 131579 | 2054C | 217708 | 217721 |
| 677C | 65713 | 65729 | 1366C | 131561 | 131585 | 2055C | 217853 | 217866 |
| 678C | 65714 | 65730 | 1367C | 131561 | 131575 | 2056C | 218040 | 218053 |
| 679C | 65715 | 65731 | 1368C | 131561 | 131583 | 2057C | 218707 | 218722 |
| 680C | 65716 | 65732 | 1369C | 131562 | 131575 | 2058C | 219076 | 219091 |
| 681C | 65717 | 65733 | 1370C | 131563 | 131576 | 2059C | 219101 | 219116 |
| 682C | 65718 | 65740 | 1371C | 131564 | 131577 | 2060C | 219191 | 219205 |
| 683C | 65718 | 65734 | 1372C | 131565 | 131578 | 2061C | 219221 | 219234 |
| 684C | 65719 | 65735 | 1373C | 131566 | 131579 | 2062C | 219601 | 219616 |
| 685C | 65720 | 65740 | 1374C | 131567 | 131580 | 2063C | 219814 | 219828 |
| 686C | 65720 | 65736 | 1375C | 131568 | 131581 | 2064C | 219818 | 219832 |
| 687C | 65721 | 65737 | 1376C | 131569 | 131582 | 2065C | 219972 | 219985 |
| 688C | 65722 | 65738 | 1377C | 131570 | 131583 | 2066C | 219984 | 220014 |
| 689C | 65723 | 65740 | 1378C | 131571 | 131584 | | | |

[0111] In some embodiments, the target sequence is selected from the group consisting of target regions 1C to 2066C as shown in Table 4 above.

### Target Cell

[0112] The term a “target cell” as used herein refers to a cell which is expressing the target nucleic acid. For the therapeutic use of the present invention it is advantageous if the target cell is infected with HBV. In some embodiments, the target cell may be in vivo or in vitro. In some embodiments, the target cell is a mammalian cell such as a rodent cell, such as a mouse cell or a rat cell, or a woodchuck cell or a primate cell such as a monkey cell (e.g. a cynomolgus monkey cell) or a human cell.

[0113] In preferred embodiments, the target cell expresses SEPT9 mRNA, such as the SEPT9 pre-mRNA or SEPT9 mature mRNA. The poly A tail of SEPT9 mRNA is typically disregarded for antisense oligonucleotide targeting.

[0114] Further, the target cell may be a hepatocyte. In one embodiment, the target cell is HBV infected primary human hepatocytes, either derived from HBV infected individuals or from a HBV infected mouse with a humanized liver (PhoenixBio, PXB-mouse).

[0115] In accordance with the present invention, the target cell may be infected with HBV. Further, the target cell may comprise HBV cccDNA. Thus, the target cell preferably comprises SEPT9 mRNA, such as the SEPT9 pre-mRNA or SEPT9 mature mRNA, and HBV cccDNA.

### Naturally Occurring Variant

[0116] The term “naturally occurring variant” refers to variants of SEPT9 gene or transcripts which originate from the same genetic loci as the target nucleic acid, but may differ for example, by virtue of degeneracy of the genetic code causing a multiplicity of codons encoding the same amino acid, or due to alternative splicing of pre-mRNA, or the presence of polymorphisms, such as single nucleotide polymorphisms (SNPs), and allelic variants. Based on the presence of the sufficient complementary sequence to the oligonucleotide, the oligonucleotide of the invention may therefore target the target nucleic acid and naturally occurring variants thereof.

[0117] In some embodiments, the naturally occurring variants have at least 95% such as at least 98% or at least 99% homology to a mammalian SEPT9 target nucleic acid, such as a target nucleic acid of SEQ ID NO: 1 and/or SEQ ID NO: 2. In some embodiments, the naturally occurring variants have at least 99% homology to the human SEPT9 target nucleic acid of SEQ ID NO: 1. In some embodiments, the naturally occurring variants are known polymorphisms.

### Inhibition of Expression

[0118] The term “inhibition of expression” as used herein is to be understood as an overall term for a SEPT9 (Septin 9) inhibitors ability to inhibit the amount or the activity of SEPT9 in a target cell. Inhibition of expression or activity may be determined by measuring the level of SEPT9 pre-mRNA or SEPT9 mRNA, or by measuring the level of SEPT9 protein or activity in a cell. Inhibition of expression may be determined in vitro or in vivo. Advantageously, the inhibition is assessed in relation to the amount of SEPT9 before administration of the SEPT9 inhibitor. Alternatively, inhibition is determined by reference to a control. It is generally understood that the control is an individual or target cell treated with a saline composition or an individual or target cell treated with a non-targeting oligonucleotide (mock).

[0119] The term “inhibition” or “inhibit” may also be referred to as down-regulate, reduce, suppress, lessen, lower, decrease the expression or activity of SEPT9.

[0120] The inhibition of expression of SEPT9 may occur e.g. by degradation of pre-mRNA or mRNA e.g. using RNase H recruiting oligonucleotides, such as gapmers or nucleic acid molecules that function via the RNA interference pathway, such as siRNA or shRNA. Alternatively, the inhibitor of the present invention may bind to SEPT9 polypeptide and inhibit the activity of SEPT9 or prevent its binding to other molecules.

[0121] In some embodiments, the inhibition of expression of the SEPT9 target nucleic acid or the activity of SEPT9 proteinresults in a decreased amount of HBV cccDNA in the target cell. Preferably, the amount of HBV cccDNA is decreased as compared to a control. In some embodiments, the decrease in amount of HBV cccDNA is at least 20%, at least 30%, as compared to acontrol. In some embodiments, the amount of cccDNA in an HBV infected cell is reduced by at least 50%, such as 60%, when compared to a control.

[0122] In some embodiments, the inhibition of expression of the SEPT9 target nucleic acid or the activity of SEPT9 protein results in a decreased amount of HBV pgRNA in the target cell. Preferably, the amount of HBV pgRNA is decreased as compared to a control. In some embodiments, the decrease in amount of HBV pgRNA is at least 20%, at least 30%, as compared to a control. In some embodiments, the amount of pgRNA in an HBV infected cell is reduced by at least 50%, such as 60%, when compared to a control.

### Sugar Modifications

[0123] The oligonucleotide of the invention may comprise one or more nucleosides which have a modified sugar moiety, i.e. a modification of the sugar moiety when compared to the ribose sugar moiety found in DNA and RNA.

[0124] Numerous nucleosides with modification of the ribose sugar moiety have been made, primarily with the aim of improving certain properties of oligonucleotides, such as affinity and/or nuclease resistance.

[0125] Such modifications include those where the ribose ring structure is modified, e.g. by replacement with a hexose ring (HNA), or a bicyclic ring, which typically have a biradical bridge between the C2 and C4 carbons on the ribose ring (LNA), or an unlinked ribose ring which typically lacks a bond between the C2 and C3 carbons (e.g. UNA). Other sugar modified nucleosides include, for example, bicyclohexose nucleic acids (WO2011/017521) or tricyclic nucleic acids (WO2013/154798). Modified nucleosides also include nucleosides where the sugar moiety is replaced with a non-sugar moiety, for example in the case of peptide nucleic acids (PNA), or morpholino nucleic acids.

[0126] Sugar modifications also include modifications made via altering the substituent groups on the ribose ring to groups other than hydrogen, or the 2′—OH group naturally found in DNA and RNA nucleosides. Substituents may, for example be introduced at the 2′, 3′, 4′ or 5′ positions.

### High Affinity Modified Nucleosides

[0127] A high affinity modified nucleoside is a modified nucleotide which, when incorporated into the oligonucleotide enhances the affinity of the oligonucleotide for its complementary target, for example as measured by the melting temperature (T^{m}). A high affinity modified nucleoside of the present invention preferably result in an increase in melting temperature in the range of +0.5 to +12° C., more preferably in the range of +1.5 to +10° C. and most preferably in the range of +3 to +8° C. per modified nucleoside. Numerous high affinity modified nucleosides are known in the art and include for example, many 2′ substituted nucleosides as well as locked nucleic acids (LNA) (see e.g. Freier & Altmann; Nucl. Acid Res., 1997, 25, 4429-4443 and Uhlmann; Curr. Opinion in Drug Development, 2000, 3(2), 293-213).

### 2′ Sugar Modified Nucleosides

[0128] A 2′ sugar modified nucleoside is a nucleoside which has a substituent other than H or —OH at the 2′ position (2′ substituted nucleoside) or comprises a 2′ linked biradical capable of forming a bridge between the 2′ carbon and a second carbon in the ribose ring, such as LNA (2′ - 4′ biradical bridged) nucleosides.

[0129] Indeed, much focus has been spent on developing 2′ sugar substituted nucleosides, and numerous 2′ substituted nucleosides have been found to have beneficial properties when incorporated into oligonucleotides. For example, the 2′ modified sugar may provide enhanced binding affinity and/or increased nuclease resistance to the oligonucleotide. Examples of 2′ substituted modified nucleosides are 2′-O-alkyl-RNA, 2′-O-methyl-RNA, 2′-alkoxy-RNA, 2′-O-methoxyethyl-RNA (MOE), 2′-amino-DNA, 2′-Fluoro-RNA, and 2′-F-ANA nucleoside. For further examples, please see e.g. Freier & Altmann; Nucl. Acid Res., 1997, 25, 4429-4443 and Uhlmann; Curr. Opinion in Drug Development, 2000, 3(2), 293-213, and Deleavey and Damha, Chemistry and Biology 2012, 19, 937. Below are illustrations of some 2′ substituted modified nucleosides.

[chemical structure]

[chemical structure]

[chemical structure]

[chemical structure]

[chemical structure]

[chemical structure]

[0130] In relation to the present invention 2′ substituted sugar modified nucleosides does not include 2′ bridged nucleosides like LNA.

### Locked Nucleic Acid Nucleosides (LNA Nucleoside)

[0131] A “LNA nucleoside” is a 2′-sugar modified nucleoside which comprises a biradical linking the C2′ and C4′ of the ribose sugar ring of said nucleoside (also referred to as a “2′- 4′ bridge”), which restricts or locks the conformation of the ribose ring. These nucleosides are also termed bridged nucleic acid or bicyclic nucleic acid (BNA) in the literature. The locking of the conformation of the ribose is associated with an enhanced affinity of hybridization (duplex stabilization) when the LNA is incorporated into an oligonucleotide for a complementary RNA or DNA molecule. This can be routinely determined by measuring the melting temperature of the oligonucleotide/complement duplex.

[0132] Non limiting, exemplary LNA nucleosides are disclosed in WO 99/014226, WO 00/66604, WO 98/039352, WO 2004/046160, WO 00/047599, WO 2007/134181, WO 2010/077578, WO 2010/036698, WO 2007/090071, WO 2009/006478, WO 2011/156202, WO 2008/154401, WO 2009/067647, WO 2008/150729, Morita et al., Bioorganic & Med.Chem. Lett. 12, 73-76, Seth et al. J. Org. Chem. 2010, Vol 75(5) pp. 1569-81, Mitsuoka et al., Nucleic Acids Research 2009, 37(4), 1225-1238, and Wan and Seth, J. Medical Chemistry 2016, 59, 9645-9667.

[0133] Particular examples of LNA nucleosides of the invention are presented in Scheme 1 (wherein B is as defined above).

[0134] Scheme 1

[chemical structure]

[chemical structure]

[chemical structure]

[chemical structure]

[chemical structure]

[chemical structure]

[chemical structure]

[chemical structure]

[chemical structure]

[chemical structure]

[chemical structure]

[chemical structure]

[chemical structure]

[chemical structure]

[chemical structure]

[chemical structure]

[chemical structure]

[chemical structure]

[0135] Particular LNA nucleosides are beta-D-oxy-LNA, 6′-methyl-beta-D-oxy LNA such as (S)-6′-methyl-beta-D-oxy-LNA (ScET) and ENA.

### RNase H Activity and Recruitment

[0136] The RNase H activity of an antisense oligonucleotide refers to its ability to recruit RNase H when in a duplex with a complementary RNA molecule. WO01/23613 provides in vitro methods for determining RNase H activity, which may be used to determine the ability to recruit RNase H. Typically an oligonucleotide is deemed capable of recruiting RNase H if it, when provided with a complementary target nucleic acid sequence, has an initial rate, as measured in pmol/l/min, of at least 5%, such as at least 10% or more than 20% of the of the initial rate determined when using a oligonucleotide having the same base sequence as the modified oligonucleotide being tested, but containing only DNA monomers with phosphorothioate linkages between all monomers in the oligonucleotide, and using the methodology provided by Example 91 - 95 of WO 01/23613 (hereby incorporated by reference). For use in determining RNase H activity, recombinant human RNase H1 is available from Creative Biomart® (Recombinant Human RNase H1 fused with His tag expressed in E. coli).

### Gapmer

[0137] The antisense oligonucleotide of the invention, or contiguous nucleotide sequence thereof, may be a gapmer, also termed gapmer oligonucleotide or gapmer designs. The antisense gapmers are commonly used to inhibit a target nucleic acid via RNase H mediated degradation. A gapmer oligonucleotide comprises at least three distinct structural regions a 5′-flank, a gap and a 3′-flank, F-G-F′ in the ‘5 -> 3’ orientation. The “gap” region (G) comprises a stretch of contiguous DNA nucleotides which enable the oligonucleotide to recruit RNase H. The gap region is flanked by a 5′ flanking region (F) comprising one or more sugar modified nucleosides, advantageously high affinity sugar modified nucleosides, and by a 3′ flanking region (F′) comprising one or more sugar modified nucleosides, advantageously high affinity sugar modified nucleosides. The one or more sugar modified nucleosides in region F and F′ enhance the affinity of the oligonucleotide for the target nucleic acid (i.e. are affinity enhancing sugar modified nucleosides). In some embodiments, the one or more sugar modified nucleosides in region F and F′ are 2′ sugar modified nucleosides, such as high affinity 2′ sugar modifications, such as independently selected from LNA and 2′-MOE.

[0138] In a gapmer design, the 5′ and 3′ most nucleosides of the gap region are DNA nucleosides, and are positioned adjacent to a sugar modified nucleoside of the 5′ (F) or 3′ (F′) region respectively. The flanks may further be defined by having at least one sugar modified nucleoside at the end most distant from the gap region, i.e. at the 5′ end of the 5′ flank and at the 3′ end of the 3′ flank.

[0139] Regions F-G-F′ form a contiguous nucleotide sequence. Antisense oligonucleotides of the invention, or the contiguous nucleotide sequence thereof, may comprise a gapmer region of formula F-G-F′.

[0140] The overall length of the gapmer design F-G-F′ may be, for example 12 to 32 nucleosides, such as 13 to 24, such as 14 to 22 nucleosides, such as from 15 to 20, such as 16 to 18 nucleosides.

[0141] By way of example, the gapmer oligonucleotide of the present invention can be represented by the following formulae:
[0142] F₁₋₈-G₅₋₁₈-F′₁₋₈, such as
[0143] F₁₋₈-G₇₋₁₈-F′₂₋₈
with the proviso that the overall length of the gapmer regions F-G-F′ is at least 12, such as at least 14 nucleotides in length.

[0144] In an aspect of the invention, the antisense oligonucleotide or contiguous nucleotide sequence thereof consists of or comprises a gapmer of formula 5′-F-G-F′-3′, where region F and F′ independently comprise or consist of 1-8 nucleosides, of which 1-4 are 2′ sugar modified and defines the 5′ and 3′ end of the F and F′ region, and G is a region between 6 and 18 nucleosides which are capable of recruiting RNase H. In some embodiments, the G region consists of DNA nucleosides.

[0145] In some embodiments, region F and F′ independently consists of or comprises a contiguous sequence of sugar modified nucleosides. In some embodiments, the sugar modified nucleosides of region F may be independently selected from 2′-O-alkyl-RNA units, 2′-O-methyl-RNA, 2′-amino-DNA units, 2′-fluoro-DNA units, 2′-alkoxy-RNA, MOE units, LNA units, arabino nucleic acid (ANA) units and 2′-fluoro-ANA units.

[0146] In some embodiments, region F and F′ independently comprises both LNA and a 2′-substituted sugar modified nucleotide (mixed wing design). In some embodiments, the 2′-substituted sugar modified nucleotide is independently selected from the group consisting of 2′-O-alkyl-RNA units, 2′-O-methyl-RNA, 2′-amino-DNA units, 2′-fluoro-DNA units, 2′-alkoxy-RNA, MOE units, arabino nucleic acid (ANA) units and 2′-fluoro-ANA units.

[0147] In some embodiments, all the modified nucleosides of region F and F′ are LNA nucleosides, such as independently selected from beta-D-oxy LNA, ENA or ScET nucleosides, wherein region F or F′, or F and F′ may optionally comprise DNA nucleosides. In some embodiments, all the modified nucleosides of region F and F′ are beta-D-oxy LNA nucleosides, wherein region F or F′, or F and F′ may optionally comprise DNA nucleosides. In such embodiments, the flanking region F or F′, or both F and F′ comprise at least three nucleosides, wherein the 5′ and 3′ most nucleosides of the F and/or F′ region are LNA nucleosides.

### LNA Gapmer

[0148] An LNA gapmer is a gapmer wherein either one or both of region F and F′ comprises or consists of LNA nucleosides. A beta-D-oxy gapmer is a gapmer wherein either one or both of region F and F′ comprises or consists of beta-D-oxy LNA nucleosides.

[0149] In some embodiments, the LNA gapmer is of formula: [LNA]₁₋₅-[region G]₆₋₁₈ -[LNA]₁₋₅, wherein region G is as defined in the Gapmer region G definition.

### MOE Gapmers

[0150] A MOE gapmers is a gapmer wherein regions F and F′ consist of MOE nucleosides. In some embodiments, the MOE gapmer is of design [MOE]₁₋₈-[Region G]₅₋₁₆-[MOE] ₁-₈, such as [MOE]₂₋₇-[Region G]₆₋₁₄-[MOE]₂₋₇, such as [MOE]₃₋₆-[Region G] ₈₋₁₂-[MOE] ₃₋₆, such as [MOE]₅-[Region G]₁₀-[MOE]₅ wherein region G is as defined in the Gapmer definition. MOE gapmers with a 5-10-5 design (MOE-DNA-MOE) have been widely used in the art.

### Region D′ or D″ in an Oligonucleotide

[0151] The oligonucleotide of the invention may in some embodiments comprise or consist of the contiguous nucleotide sequence of the oligonucleotide which is complementary to the target nucleic acid, such as a gapmer region F-G-F′, and further 5′ and/or 3′ nucleosides. The further 5′ and/or 3′ nucleosides may or may not be fully complementary to the target nucleic acid. Such further 5′ and/or 3′ nucleosides may be referred to as region D′ and D″ herein.

[0152] The addition of region D′ or D″ may be used for the purpose of joining the contiguous nucleotide sequence, such as the gapmer, to a conjugate moiety or another functional group. When used for joining the contiguous nucleotide sequence with a conjugate moiety is can serve as a biocleavable linker. Alternatively, it may be used to provide exonuclease protection or for ease of synthesis or manufacture.

[0153] Region D′ and D″ can be attached to the 5′ end of region F or the 3′ end of region F′, respectively to generate designs of the following formulas D′-F-G-F′, F-G-F′-D′’ or

[0154] D′-F-G-F′-D′’. In this instance the F-G-F′ is the gapmer portion of the oligonucleotide and region D′ or D″ constitute a separate part of the oligonucleotide.

[0155] Region D′ or D″ may independently comprise or consist of 1, 2, 3, 4 or 5 additional nucleotides, which may be complementary or non-complementary to the target nucleic acid. The nucleotide adjacent to the F or F′ region is not a sugar-modified nucleotide, such as a DNA or RNA or base modified versions of these. The D′ or D″ region may serve as a nuclease susceptible biocleavable linker (see definition of linkers). In some embodiments, the additional 5′ and/or 3′ end nucleotides are linked with phosphodiester linkages, and are DNA or RNA. Nucleotide based biocleavable linkers suitable for use as region D′ or D″ are disclosed in WO2014/076195, which include by way of example a phosphodiester linked DNA dinucleotide. The use of biocleavable linkers in poly-oligonucleotide constructs is disclosed in WO2015/113922, where they are used to link multiple antisense constructs (e.g. gapmer regions) within a single oligonucleotide.

[0156] In one embodiment, the oligonucleotide of the invention comprises a region D′ and/or D″ in addition to the contiguous nucleotide sequence which constitutes the gapmer.

[0157] In some embodiments, the oligonucleotide of the present invention can be represented by the following formulae:
[0158] F-G-F′; in particular F₁₋₈-G₅₋₁₈-F′₂₋₈
[0159] D′-F-G-F′, in particular D′₁₋₃-F₁₋₈-G₅₋₁₈-F′₂₋₈
[0160] F-G-F′-D″, in particular F₁₋₈-G₅₋₁₈-F′₂₋₈-D″₁₋₃
[0161] D′-F-G-F′-D″, in particular D′₁₋₃- F₁₋₈-G₅₋₁₈-F′₂₋₈-D″₁₋₃

[0162] In some embodiments, the internucleoside linkage positioned between region D′ and region F is a phosphodiester linkage. In some embodiments, the internucleoside linkage positioned between region F′ and region D″ is a phosphodiester linkage.

### Conjugate

[0163] The term conjugate as used herein refers to an oligonucleotide which is covalently linked to a non-nucleotide moiety (conjugate moiety or region C or third region). The conjugate moiety may be covalently linked to the antisense oligonucleotide, optionally via a linker group, such as region D′ or D″.

[0164] Oligonucleotide conjugates and their synthesis have been reported in comprehensive reviews by Manoharan in Antisense Drug Technology, Principles, Strategies, and Applications, S.T. Crooke, ed., Ch. 16, Marcel Dekker, Inc., 2001 and Manoharan, Antisense and Nucleic Acid Drug Development, 2002, 12, 103, each of which is incorporated herein by reference in its entirety.

[0165] In some embodiments, the non-nucleotide moiety (conjugate moiety) is selected from the group consisting of carbohydrates (e.g. galactose or N-acetylgalactosamine (GaINAc)), cell surface receptor ligands, drug substances, hormones, lipophilic substances, polymers, proteins (e.g. antibodies), peptides, toxins (e.g. bacterial toxins), vitamins, viral proteins (e.g. capsids) or combinations thereof.

[0166] Exemplary conjugate moieties are those capable of binding to the asialoglycoprotein receptor (ASGPR). In particular, tri-valent N-acetylgalactosamine conjugate moieties are suitable for binding to the ASGPR, see for example WO 2014/076196, WO 2014/207232 and WO 2014/179620 (hereby incorporated by reference). Such conjugates serve to enhance uptake of the oligonucleotide to the liver.

### Linkers

[0167] A linkage or linker is a connection between two atoms that links one chemical group or segment of interest to another chemical group or segment of interest via one or more covalent bonds. Conjugate moieties can be attached to the oligonucleotide directly or through a linking moiety (e.g. linker or tether). Linkers serve to covalently connect a third region, e.g. a conjugate moiety (region C), to a first region, e.g. an oligonucleotide or contiguous nucleotide sequence complementary to the target nucleic acid (region A).

[0168] In some embodiments of the invention the conjugate or oligonucleotide conjugate of the invention may optionally, comprise a linker region (second region or region B and/or region Y) which is positioned between the oligonucleotide or contiguous nucleotide sequence complementary to the target nucleic acid (region A or first region) and the conjugate moiety (region C or third region).

[0169] Region B refers to biocleavable linkers comprising or consisting of a physiologically labile bond that is cleavable under conditions normally encountered or analogous to those encountered within a mammalian body. Conditions under which physiologically labile linkers undergo chemical transformation (e.g., cleavage) include chemical conditions such as pH, temperature, oxidative or reductive conditions or agents, and salt concentration found in or analogous to those encountered in mammalian cells. Mammalian intracellular conditions also include the presence of enzymatic activity normally present in a mammalian cell such as from proteolytic enzymes or hydrolytic enzymes or nucleases. In one embodiment, the biocleavable linker is susceptible to S1 nuclease cleavage. In a preferred embodiment the nuclease susceptible linker comprises between 1 and 5 nucleosides, such as 1, 2, 3, 4 or 5 nucleosides, more preferably between 2 and 4 nucleosides and most preferably 2 or 3 linked nucleosides comprising at least two consecutive phosphodiester linkages, such as at least 3 or 4 or 5 consecutive phosphodiester linkages. Preferably the nucleosides are DNA or RNA. Phosphodiester containing biocleavable linkers are described in more detail in WO 2014/076195 (hereby incorporated by reference).

[0170] Region Y refers to linkers that are not necessarily biocleavable but primarily serve to covalently connect a conjugate moiety (region C or third region), to an oligonucleotide (region A or first region). The region Y linkers may comprise a chain structure or an oligomer of repeating units such as ethylene glycol, amino acid units or amino alkyl groups The oligonucleotide conjugates of the present invention can be constructed of the following regional elements A-C, A-B-C, A-B-Y-C, A-Y-B-C or A-Y-C. In some embodiments, the linker (region Y) is an amino alkyl, such as a C2 - C36 amino alkyl group, including, for example C6 to C12 amino alkyl groups. some embodiments the linker (region Y) is a C6 amino alkyl group.

### Treatment

[0171] The term “treatment” as used herein refers to both treatment of an existing disease (e.g. a disease or disorder as herein referred to), or prevention of a disease, i.e. prophylaxis. It will therefore be recognized that treatment as referred to herein may, in some embodiments, be prophylactic. Prophylactic can be understood as preventing an HBV infection from turning into a chronic HBV infection or the prevention of severe liver diseases such as liver cirrhosis and hepatocellular carcinoma caused by a chronic HBV infection.

### Patient

[0172] For the purposes of the present invention the “subject” (or “patient”) may be a vertebrate. In context of the present invention, the term “subject” includes both humans and other animals, particularly mammals, and other organisms. Thus, the herein provided means and methods are applicable to both human therapy and veterinary applications. Preferably, the subject is a mammal. More preferably the subject is human.

[0173] As described elsewhere herein, the patient to be treated may suffers from HBV infection, such as chronic HBV infection. In some embodiments, the patient suffering from HBV infection may suffer from hepatocellular carcinoma (HCC). In some embodiments, the patient suffering from HBV infection does not suffer from hepatocellular carcinoma. In some embodiments, the patient does not suffer from an HCV infection.

### DETAILED DESCRIPTION OF THE INVENTION

[0174] HBV cccDNA in infected hepatocytes is responsible for persistent chronic infection and reactivation, being the template for all viral subgenomic transcripts and pre-genomic RNA (pgRNA) to ensure both newly synthesized viral progeny and cccDNA pool replenishment via intracellular nucleocapsid recycling. In the context of the present invention it was for the first time shown that SEPT9 is associated with cccDNA stability. This knowledge allows for the opportunity to destabilize cccDNA in HBV infected subjects which in turn opens the opportunity for a complete cure of chronically infected HBV patients.

[0175] One aspect of the present invention is a SEPT9 inhibitor for use in the treatment and/or prevention of Hepatitis B virus (HBV) infection, in particular a chronic HBV infection.

[0176] The SEPT9 inhibitor can for example be a small molecule that specifically binds to SEPT9 protein, wherein said inhibitor prevents or reduces binding of SEPT9 protein to cccDNA.

[0177] An embodiment of the invention is a SEPT9 inhibitor which is capable of reducing cccDNA and/or pgRNA in an infected cell, such as an HBV infected cell.

[0178] In a further embodiment, the SEPT9 inhibitor is capable of reducing HBsAg and/or HBeAg in vivo in an HBV infected individual.

### SEPT9 Inhibitors for Use in Treatment of HBV

[0179] Without being bound by theory, it is believed that SEPT9 is involved in the stabilization of the cccDNA in the cell nucleus, either via direct or indirect binding to the cccDNA, and by preventing the binding/association of SEPT9 with cccDNA, the cccDNA is destabilized and becomes prone to degradation. One embodiment of the invention is therefore a SEPT9 inhibitor which interacts with the SEPT9 protein, and prevents or reduces its binding/association to cccDNA.

[0180] In some embodiments of the present invention, the inhibitor is an antibody, antibody fragment or a small molecule compound. In some embodiments, the inhibitor may be an antibody, antibody fragment or a small molecule that specifically binds to the SEPT9 protein, such as the SEPT9 protein encoded by SEQ ID NO: 1.

### Nucleic Acid Molecules of the Invention

[0181] Therapeutic nucleic acid molecules are potentially excellent SEPT9 inhibitors since they can target the SEPT9 transcript and promote its degradation either via the RNA interference pathway or via RNase H cleavage. Alternatively, oligonucleotides such as aptamers can also act as inhibitors of SEPT9 protein interactions.

[0182] One aspect of the present invention is a SEPT9 targeting nucleic acid molecule for use in treatment and/or prevention of Hepatitis B virus (HBV) infection. Such a nucleic acid molecule can be selected from the group consisting of single stranded antisense oligonucleotide, siRNA molecule, and shRNA molecule.

[0183] The present section describes novel nucleic acid molecule suitable for use in treatment and/or prevention of Hepatitis B virus (HBV) infection.

[0184] The nucleic acid molecule of the present invention is capable of inhibiting expression of SEPT9 in vitro and in vivo. The inhibition is achieved by hybridizing an oligonucleotide to a target nucleic acid encoding SEPT9 or which is involved in the regulation of SEPT9. The target nucleic acid may be a mammalian SEPT9 sequence. In some embodiments, the target nucleic acid may be a human SEPT9 pre-mRNA sequence, such as the sequence of SEQ ID NO: 1 or a mature SEPT9 mRNA. In some embodiments, the target nucleic acid may be a cynomolgus monkey SEPT9 sequence such as the sequence of SEQ ID NO: 2.

[0185] In some embodiments, the nucleic acid molecule of the invention is capable of modulating the expression of the target by inhibiting or down-regulating it. Preferably, such modulation produces an inhibition of expression of at least 20% compared to the normal expression level of the target, more preferably at least 30%, at least 40%, at least 50%, at least 60%, inhibition compared to the normal expression level of the target. In some embodiments, the nucleic acid molecule of the invention may be capable of inhibiting expression levels of SEPT9 mRNA by at least 60% or 70% in vitro by transfecting 25 nM nucleic acid molecule into PXB-PHH cells, this range of target reduction is advantageous in terms of selecting nucleic acid molecules with good correlation to the cccDNA reduction. Suitably, the examples provide assays which may be used to measure SEPT9 RNA or protein inhibition (e.g. example 1 and the “Materials and Methods” section). The target inhibition is triggered by the hybridization between a contiguous nucleotide sequence of the oligonucleotide, such as the guide strand of a siRNA or gapmer region of an antisense oligonucleotide, and the target nucleic acid. In some embodiments, the nucleic acid molecule of the invention comprises mismatches between the oligonucleotide and the target nucleic acid. Despite mismatches hybridization to the target nucleic acid may still be sufficient to show a desired inhibition of SEPT9 expression. Reduced binding affinity resulting from mismatches may advantageously be compensated by increased number of nucleotides in the oligonucleotide complementary to the target nucleic acid and/or an increased number of modified nucleosides capable of increasing the binding affinity to the target, such as 2′ sugar modified nucleosides, including LNA, present within the oligonucleotide sequence.

[0186] An aspect of the present invention relates to a nucleic acid molecules of 12 to 60 nucleotides in length, which comprises a contiguous nucleotide sequence of at least 12 nucleotides in length, such as at least 12 to 30 nucleotides in length, which is at least 95% complementary, such as fully complementary, to a mammalian SEPT9 target nucleic acid, in particular a human SEPT9 nucleic acid. These nucleic acid molecules are capable of inhibiting the expression of SEPT9.

[0187] An aspect of the invention relates to a nucleic acid molecule of 12 to 30 nucleotides in length, comprising a contiguous nucleotide sequence of at least 12 nucleotides, such as 12 to 30 nucleotides in length which is at least 90% complementary, such as fully complementary, to a mammalian SEPT9 target sequence.

[0188] A further aspect of the present invention relates to a nucleic acid molecule according to the invention comprising a contiguous nucleotide sequence of 12 to 20 nucleotides in length with at least 90% complementary, such as fully complementary, to the target sequence of SEQ ID NO: 1.

[0189] In some embodiments, the nucleic acid molecule comprises a contiguous sequence of 12 to 30 nucleotides in length, which is at least 90% complementary, such as at least 91%, such as at least 92%, such as at least 93%, such as at least 94%, such as at least 95%, such as at least 96%, such as at least 97%, such as at least 98%, or 100% complementary with a region of the target nucleic acid or a target sequence.

[0190] It is advantageous if the oligonucleotide, or contiguous nucleotide sequence thereof is fully complementary (100% complementary) to a region of the target sequence, or in some embodiments may comprise one or two mismatches between the oligonucleotide and the target sequence.

[0191] In some embodiments, the oligonucleotide sequence is 100% complementary to a region of the target sequence of SEQ ID NO: 1.

[0192] In some embodiments, the nucleic acid molecule or the contiguous nucleotide sequence of the invention is at least 90% or 95% complementary, such as fully (or 100%) complementary, to the target nucleic acid of SEQ ID NO: 1 and 2.

[0193] In some embodiments, the oligonucleotide or the contiguous nucleotide sequence of the invention is at least 90% or 95% complementary, such as fully (or 100%) complementary, to the target nucleic acid of SEQ ID NO: 1 and SEQ ID NO: 2 and SEQ ID NO: 3.

[0194] In some embodiments, the contiguous sequence of the nucleic acid molecule of the present invention is least 90% complementary, such as fully complementary to a region of SEQ ID NO: 1, selected from the group consisting of target regions 1C to 2066C as shown in Table 4.

[0195] In some embodiments, the nucleic acid molecule of the invention comprises or consists of 12 to 60 nucleotides in length, such as from 13 to 50, such as from 14 to 35, such as 15 to 30, such as from 16 to 22 contiguous nucleotides in length. In a preferred embodiment, the nucleic acid molecule comprises or consists of 15, 16, 17, 18, 19, 20, 21 or 22 nucleotides in length.

[0196] In some embodiments, the contiguous nucleotide sequence of the nucleic acid molecule which is complementary to the target nucleic acids comprises or consists of 12 to 30, such as from 13 to 25, such as from 15 to 23, such as from 16 to 22, contiguous nucleotides in length.

[0197] In some embodiments, the oligonucleotide is selected from the group consisting of an antisense oligonucleotide, siRNA and shRNA.

[0198] In some embodiments, the contiguous nucleotide sequence of the siRNA or shRNA which is complementary to the target sequence comprises or consists of 18 to 28, such as from 19 to 26, such as from 20 to 24, such as from 21 to 23, contiguous nucleotides in length.

[0199] In some embodiments, the contiguous nucleotide sequence of the antisense oligonucleotide which is complementary to the target nucleic acids comprises or consists of 12 to 22, such as from 14 to 20, such as from 16 to 20, such as from 15 to 18, such as from 16 to 18, such as from 16, 17, 18, 19 or 20 contiguous nucleotides in length.

[0200] It is understood that the contiguous oligonucleotide sequence (motif sequence) can be modified to, for example, increase nuclease resistance and/or binding affinity to the target nucleic acid.

[0201] The pattern in which the modified nucleosides (such as high affinity modified nucleosides) are incorporated into the oligonucleotide sequence is generally termed oligonucleotide design.

[0202] The nucleic acid molecule of the invention may be designed with modified nucleosides and RNA nucleosides (in particular for siRNA and shRNA molecules) or DNA nucleosides (in particular for single stranded antisense oligonucleotides). Advantageously, high affinity modified nucleosides are used.

[0203] In advantageous embodiments, the nucleic acid molecule or contiguous nucleotide sequence comprises one or more sugar modified nucleosides, such as 2′ sugar modified nucleosides, such as comprise one or more 2′ sugar modified nucleoside independently selected from the group consisting of 2′-O-alkyl-RNA, 2′-O-methyl-RNA, 2′-alkoxy-RNA, 2′-O-methoxyethyl-RNA, 2′-amino-DNA, 2′-fluoro-DNA, arabino nucleic acid (ANA), 2′-fluoro-ANA and LNA nucleosides. It is advantageous if one or more of the modified nucleoside(s) is a locked nucleic acid (LNA).

[0204] In some embodiments, the contiguous nucleotide sequence comprises LNA nucleosides.

[0205] In some embodiments, the contiguous nucleotide sequence comprises LNA nucleosides and DNA nucleosides.

[0206] In some embodiments, the contiguous nucleotide sequence comprises 2′-O-methoxyethyl (2′MOE) nucleosides.

[0207] In some embodiments, the contiguous nucleotide sequence comprises 2′-O-methoxyethyl (2′MOE) nucleosides and DNA nucleosides.

[0208] Advantageously, the 3′ most nucleoside of the antisense oligonucleotide, or contiguous nucleotide sequence thereof is a 2′sugar modified nucleoside.

[0209] In a further embodiment the nucleic acid molecule comprises at least one modified internucleoside linkage. Suitable internucleoside modifications are described in the “Definitions” section under “Modified internucleoside linkage”.

[0210] Advantageously, the oligonucleotide comprises at least one modified internucleoside linkage, such as phosphorothioate or phosphorodithioate.

[0211] In some embodiments, at least one internucleoside linkage in the contiguous nucleotide sequence is a phosphodiester internucleoside linkages.

[0212] It is advantageous if at least 2 to 3 internucleoside linkages at the 5′ or 3′ end of the oligonucleotide are phosphorothioate internucleoside linkages.

[0213] For single stranded antisense oligonucleotides it is advantageous if at least 75%, such as all, the internucleoside linkages within the contiguous nucleotide sequence are phosphorothioate internucleoside linkages. In some embodiments, all the internucleotide linkages in the contiguous sequence of the single stranded antisense oligonucleotide are phosphorothioate linkages.

[0214] In an advantageous embodiment of the invention the antisense oligonucleotide of the invention is capable of recruiting RNase H, such as RNase H1. An advantageous structural design is a gapmer design as described in the “Definitions” section under for example “Gapmer”, “LNA Gapmer” and “MOE gapmer”. In the present invention it is advantageous if the antisense oligonucleotide of the invention is a gapmer with an F-G-F′ design.

[0215] In all instances the F-G-F′ design may further include region D′ and/or D″ as described in the “Definitions” section under “Region D′ or D″ in an oligonucleotide”.

[0216] The invention provides antisense oligonucleotides according to the invention, such as antisense oligonucleotides 12 - 24, such as 12 - 18 in length, nucleosides in length wherein the antisense oligonucleotide comprises a contiguous nucleotide sequence comprising at least 14, such as at least 15, such as 16 contiguous nucleotides present in SEQ ID NO 17.

[0217] The invention provides antisense oligonucleotides according to the invention, such as antisense oligonucleotides 12 - 24 nucleosides in length, such as 12 - 18 in length, wherein the antisense oligonucleotide comprises a contiguous nucleotide sequence comprising at least 14, such as at least 15, such as 16 contiguous nucleotides present in SEQ ID NO 18.

[0218] The invention provides LNA gapmers according to the invention comprising or consisting of a contiguous nucleotide sequence shown in SEQ ID NO 17 or 18. In some embodiments, the LNA gapmer is a LNA gapmer with CMP ID NO: 17_1 or 18_1 in Table 6.

[0219] In a further aspect, of the invention the nucleic acid molecules, such as the antisense oligonucleotide, siRNA or shRNA, of the invention can be targeted directly to the liver by covalently attaching them to a conjugate moiety capable of binding to the asialoglycoprotein receptor (ASGPr), such as divalent or trivalent GaINAc cluster.

### Conjugates

[0220] Since HBV infection primarily affects the hepatocytes in the liver it is advantageous to conjugate the SEPT9 inhibitor to a conjugate moiety that will increase the delivery of the inhibitor to the liver compared to the unconjugated inhibitor. In one embodiment, liver targeting moieties are selected from moieties comprising cholesterol or other lipids or conjugate moieties capable of binding to the asialoglycoprotein receptor (ASGPR).

[0221] In some embodiments, the invention provides a conjugate comprising a nucleic acid molecule of the invention covalently attached to a conjugate moiety.

[0222] The asialoglycoprotein receptor (ASGPR) conjugate moiety comprises one or more carbohydrate moieties capable of binding to the asialoglycoprotein receptor (ASPGR targeting moieties) with affinity equal to or greater than that of galactose. The affinities of numerous galactose derivatives for the asialoglycoprotein receptor have been studied (see for example: Jobst, S.T. and Drickamer, K. JB.C. 1996, 271, 6686) or are readily determined using methods typical in the art.

[0223] In one embodiment, the conjugate moiety comprises at least one asialoglycoprotein receptor targeting moiety selected from group consisting of galactose, galactosamine, N-formyl-galactosamine, N-acetylgalactosamine, N-propionyl-galactosamine, N-n-butanoyl-galactosamine and N-isobutanoylgalactosamine. Advantageously, the asialoglycoprotein receptor targeting moiety is N-acetylgalactosamine (GaINAc).

[0224] To generate the ASGPR conjugate moiety the ASPGR targeting moieties (preferably GaINAc) can be attached to a conjugate scaffold. Generally, the ASPGR targeting moieties can be at the same end of the scaffold. In one embodiment, the conjugate moiety consists of two to four terminal GaINAc moieties linked to a spacer which links each GaINAc moiety to a brancher molecule that can be conjugated to the antisense oligonucleotide.

[0225] In a further embodiment, the conjugate moiety is mono-valent, di-valent, tri-valent or tetra-valent with respect to asialoglycoprotein receptor targeting moieties. Advantageously, the asialoglycoprotein receptor targeting moiety comprises N-acetylgalactosamine (GaINAc) moieties.

[0226] GaINAc conjugate moieties can include, for example, those described in WO 2014/179620 and WO 2016/055601 and PCT/EP2017/059080 (hereby incorporated by reference), as well as small peptides with GaINAc moieties attached such as Tyr-Glu-Glu-(aminohexyl GaINAc)3 (YEE(ahGaINAc)3; a glycotripeptide that binds to asialoglycoprotein receptor on hepatocytes, see, e.g., Duff, et al., Methods Enzymol, 2000, 313, 297); lysine-based galactose clusters (e.g., L3G4; Biessen, et al., Cardovasc. Med., 1999, 214); and cholane-based galactose clusters (e.g., carbohydrate recognition motif for asialoglycoprotein receptor).

[0227] The ASGPR conjugate moiety, in particular a trivalent GaINAc conjugate moiety, may be attached to the 3′- or 5′-end of the oligonucleotide using methods known in the art. In one embodiment, the ASGPR conjugate moiety is linked to the 5′-end of the oligonucleotide.

[0228] In one embodiment, the conjugate moiety is a tri-valent N-acetylgalactosamine (GaINAc), such as those shown in FIG. 1A-1 to FIG. 1D-2. In one embodiment, the conjugate moiety is the tri-valent N-acetylgalactosamine (GaINAc) of FIG. 1A-1 or FIG. 1A-2, or a mixture of both. In one embodiment, the conjugate moiety is the tri-valent N-acetylgalactosamine (GaINAc) of FIG. 1B-1 or FIG. 1B-2, or a mixture of both. In one embodiment, the conjugate moiety is the tri-valent N-acetylgalactosamine (GaINAc) of FIG. 1C-1 or FIG. 1C-2, or a mixture of both. In one embodiment, the conjugate moiety is the tri-valent N-acetylgalactosamine (GaINAc) of FIG. 1D-1 or FIG. 1D-2, or a mixture of both.

### Method of Manufacture

[0229] In a further aspect, the invention provides methods for manufacturing the oligonucleotides of the invention comprising reacting nucleotide units and thereby forming covalently linked contiguous nucleotide units comprised in the oligonucleotide. Preferably, the method uses phophoramidite chemistry (see for example Caruthers et al, 1987, Methods in Enzymology vol. 154, pages 287-313). In a further embodiment the method further comprises reacting the contiguous nucleotide sequence with a conjugating moiety (ligand) to covalently attach the conjugate moiety to the oligonucleotide. In a further aspect, a method is provided for manufacturing the composition of the invention, comprising mixing the oligonucleotide or conjugated oligonucleotide of the invention with a pharmaceutically acceptable diluent, solvent, carrier, salt and/or adjuvant.

### Pharmaceutical Salt

[0230] The compounds according to the present invention may exist in the form of their pharmaceutically acceptable salts. The term “pharmaceutically acceptable salt” refers to conventional acid-addition salts or base-addition salts that retain the biological effectiveness and properties of the compounds of the present invention.

[0231] In a further aspect, the invention provides a pharmaceutically acceptable salt of the nucleic acid molecules or a conjugate thereof, such as a pharmaceutically acceptable sodium salt, ammonium salt or potassium salt.

### Pharmaceutical Composition

[0232] In a further aspect, the invention provides pharmaceutical compositions comprising any of the compounds of the invention, in particular the aforementioned nucleic acid molecules and/or nucleic acid molecule conjugates or salts thereof and a pharmaceutically acceptable diluent, carrier, salt and/or adjuvant. A pharmaceutically acceptable diluent includes phosphate-buffered saline (PBS) and pharmaceutically acceptable salts include, but are not limited to, sodium and potassium salts. In some embodiments, the pharmaceutically acceptable diluent is sterile phosphate buffered saline. In some embodiments, the nucleic acid molecule is used in the pharmaceutically acceptable diluent at a concentration of 50 to 300 µM solution.

[0233] Suitable formulations for use in the present invention are found in Remington’s Pharmaceutical Sciences, Mack Publishing Company, Philadelphia, Pa., 17th ed., 1985. For a brief review of methods for drug delivery, see, e.g., Langer (Science 249:1527-1533, 1990). WO 2007/031091 provides further suitable and preferred examples of pharmaceutically acceptable diluents, carriers and adjuvants (hereby incorporated by reference). Suitable dosages, formulations, administration routes, compositions, dosage forms, combinations with other therapeutic agents, pro-drug formulations are also provided in WO2007/031091.

[0234] In some embodiments, the nucleic acid molecule or the nucleic acid molecule conjugates of the invention, or pharmaceutically acceptable salt thereof is in a solid form, such as a powder, such as a lyophilized powder.

[0235] Compounds, nucleic acid molecules or nucleic acid molecule conjugates of the invention may be mixed with pharmaceutically acceptable active or inert substances for the preparation of pharmaceutical compositions or formulations. Compositions and methods for the formulation of pharmaceutical compositions are dependent upon a number of criteria, including, but not limited to, route of administration, extent of disease, or dose to be administered.

[0236] These compositions may be sterilized by conventional sterilization techniques, or may be sterile filtered. The resulting aqueous solutions may be packaged for use as is, or lyophilized, the lyophilized preparation being combined with a sterile aqueous carrier prior to administration. The pH of the preparations typically will be between 3 and 11, more preferably between 5 and 9 or between 6 and 8, and most preferably between 7 and 8, such as 7 to 7.5. The resulting compositions in solid form may be packaged in multiple single dose units, each containing a fixed amount of the above-mentioned agent or agents, such as in a sealed package of tablets or capsules. The composition in solid form can also be packaged in a container for a flexible quantity, such as in a squeezable tube designed for a topically applicable cream or ointment.

[0237] In some embodiments, the nucleic acid molecule or nucleic acid molecule conjugate of the invention is a prodrug. In particular with respect to nucleic acid molecule conjugates the conjugate moiety is cleaved off the nucleic acid molecule once the prodrug is delivered to the site of action, e.g. the target cell.

### Administration

[0238] The compounds, nucleic acid molecules or nucleic acid molecule conjugates or pharmaceutical compositions of the present invention may be administered topical (such as, to the skin, inhalation, ophthalmic or otic) or enteral (such as, orally or through the gastrointestinal tract) or parenteral (such as, intravenous, subcutaneous, intra-muscular, intracerebral, intracerebroventricular or intrathecal).

[0239] In a preferred embodiment the oligonucleotide or pharmaceutical compositions of the present invention are administered by a parenteral route including intravenous, intraarterial, subcutaneous, intraperitoneal or intramuscular injection or infusion. In one embodiment, the active nucleic acid molecule or nucleic acid molecule conjugate is administered intravenously. In another embodiment, the active nucleic acid molecule or nucleic acid molecule conjugate is administered subcutaneously.

[0240] In some embodiments, the nucleic acid molecule, nucleic acid molecule conjugate or pharmaceutical composition of the invention is administered at a dose of 0.1 - 15 mg/kg, such as from 0.2 - 10 mg/kg, such as from 0.25 - 5 mg/kg. The administration can be once a week, every second week, every third week or even once a month.

[0241] The invention also provides for the use of the nucleic acid molecule or nucleic acid molecule conjugate of the invention as described for the manufacture of a medicament wherein the medicament is in a dosage form for subcutaneous administration.

### Combination Therapies

[0242] In some embodiments, the inhibitor of the present invention such as the nucleic acid molecule, nucleic acid molecule conjugate or pharmaceutical composition of the invention is for use in a combination treatment with another therapeutic agent. The therapeutic agent can for example be the standard of care for the diseases or disorders described above.

[0243] By way of example, the SEPT9 inhibitor, such as the nucleic acid molecule or the nucleic acid molecule conjugate of the present invention may be used in combination with other actives, such as oligonucleotide-based antivirals — such as sequence specific oligonucleotide-based antivirals —acting either through antisense (including other LNA oligomers), siRNAs (such as ARC520), aptamers, morpholinos or any other antiviral, nucleotide sequence-dependent mode of action.

[0244] By way of further example, the SEPT9 inhibitor, such as the nucleic acid molecule or the nucleic acid molecule conjugate of the present invention may be used in combination with other actives, such as immune stimulatory antiviral compounds, such as interferon (e.g. pegylated interferon alpha), TLR7 agonists (e.g. GS-9620), or therapeutic vaccines.

[0245] By way of further example, the SEPT9 inhibitor, such as the nucleic acid molecule or the nucleic acid molecule conjugate of the present invention may be used in combination with other actives, such as small molecules, with antiviral activity. These other actives could be, for example, nucleoside/nucleotide inhibitors (e.g. entecavir or tenofovir disoproxil fumarate), encapsidation inhibitors, entry inhibitors (e.g. Myrcludex B).

[0246] In certain embodiments, the additional therapeutic agent may be an HBV agent, an Hepatitis C virus (HCV) agent, a chemotherapeutic agent, an antibiotic, an analgesic, a nonsteroidal antiinflammatory (NSAID) agent, an antifungal agent, an antiparasitic agent, an anti-nausea agent, an anti-diarrheal agent, or an immunosuppressant agent.

[0247] In particular related embodiments, the additional HBV agent may be interferon alpha-2b, interferon alpha-2a, and interferon alphacon-1 (pegylated and unpegylated), ribavirin; an HBV RNA replication inhibitor; a second antisense oligomer; an HBV therapeutic vaccine; an HBV prophylactic vaccine; lamivudine (3TC); entecavir (ETV); tenofovir diisoproxil fumarate (TDF); telbivudine (LdT); adefovir; or an HBV antibody therapy (monoclonal or polyclonal).

[0248] In other particular related embodiments, the additional HCV agent may be interferon alpha-2b, interferon alpha-2a, and interferon alphacon-1 (pegylated and unpegylated); ribavirin; pegasys; an HCV RNA replication inhibitor (e.g., ViroPharma’s VP50406 series); an HCV antisense agent; an HCV therapeutic vaccine; an HCV protease inhibitor; an HCV helicase inhibitor; or an HCV monoclonal or polyclonal antibody therapy.

### Applications

[0249] The nucleic acid molecules of the invention may be utilized as research reagents for, for example, diagnostics, therapeutics and prophylaxis.

[0250] In research, such nucleic acid molecules may be used to specifically modulate the synthesis of SEPT9 protein in cells (e.g. in vitro cell cultures) and experimental animals thereby facilitating functional analysis of the target or an appraisal of its usefulness as a target for therapeutic intervention. Typically, the target modulation is achieved by degrading or inhibiting the mRNA producing the protein, thereby prevent protein formation or by degrading or inhibiting a modulator of the gene or mRNA producing the protein.

[0251] If employing the nucleic acid molecules of the invention in research or diagnostics the target nucleic acid may be a cDNA or a synthetic nucleic acid derived from DNA or RNA.

[0252] Also encompassed by the present invention is an in vivo or in vitro method for modulating SEPT9 expression in a target cell which is expressing SEPT9, said method comprising administering a nucleic acid molecule, conjugate compound or pharmaceutical composition of the invention in an effective amount to said cell.

[0253] In some embodiments, the target cell, is a mammalian cell in particular a human cell. The target cell may be an in vitro cell culture or an in vivo cell forming part of a tissue in a mammal. In preferred embodiments, the target cell is present in in the liver. The target cell may be a hepatocyte.

[0254] One aspect of the present invention is related the SEPT9 inhibitor, such as the nucleic acid molecules, conjugate compounds or pharmaceutical compositions of the invention for use as a medicament.

[0255] In an aspect of the invention, the SEPT9 inhibitor, such as the nucleic acid molecules, conjugate compound or pharmaceutical composition of the invention is capable of reducing the cccDNA level in the infected cells and therefore inhibiting HBV infection. In particular, the nucleic acid molecule is capable of affecting one or more of the following parameters i) reducing cccDNA and/or ii) reducing pgRNA and/or iii) reducing HBV DNA and/or iv) reducing HBV viral antigens in an infected cell.

[0256] For example, nucleic acid molecule that inhibits HBV infection may reduce i) the cccDNA levels in an infected cell by at least 40% such as 50% or 60%, reduction compared to controls; or ii) the level of pgRNA by at least 40% such as 50% or 60% reduction compared to controls. The controls may be untreated cells or animals, or cells or animals treated with an appropriate negative control.

[0257] Inhibition of HBV infection may be measured in vitro using HBV infected primary human hepatocytes or in vivo using humanized hepatocytes PXB mouse model (available at PhoenixBio, see also Kakuni et al 2014 Int. J. Mol. Sci. 15:58-74). Inhibition of secretion of HBsAg and/or HBeAg may be measured by ELISA, e.g. by using the CLIA ELISA Kit (Autobio Diagnostic) according to the manufacturers’ instructions. Reduction of intracellular cccDNA or HBV mRNA and pgRNA may be measured by qPCR, e.g. as described in the Materials and Methods section. Further methods for evaluating whether a test compound inhibits HBV infection are measuring secretion of HBV DNA by qPCR e.g. as described in WO 2015/173208 or using Northern Blot; in-situ hybridization, or immuno-fluorescence.

[0258] Due to the reduction of SEPT9 levels the SEPT9 inhibitor, such as the nucleic acid molecules, conjugate compounds or pharmaceutical compositions of the present invention can be used to inhibit development of or in the treatment of HBV infection. In particular, through the destabilization and reduction of the cccDNA, the nucleic acid molecules, conjugate compounds or pharmaceutical compositions of the present invention more efficiently inhibits development of or treats a chronic HBV infection as compared to a compound that only reduces secretion of HBsAg.

[0259] Accordingly, one aspect of the present invention is related to use of the SEPT9 inhibitor, such as the nucleic acid molecule, conjugate compounds or pharmaceutical compositions of the invention to reduce cccDNA and/or pgRNA in an HBV infected individual.

[0260] A further aspect of the invention relates to the use of the SEPT9 inhibitor, such as the nucleic acid molecules, conjugate compounds or pharmaceutical compositions of the invention to inhibit development of or treat a chronic HBV infection.

[0261] A further aspect of the invention relates to the use of the SEPT9 inhibitor, such as the nucleic acid molecules, conjugate compounds or pharmaceutical compositions of the invention to reduce the infectiousness of a HBV infected person. In a particular aspect of the invention, the SEPT9 inhibitor, such as the nucleic acid molecules, conjugate compounds or pharmaceutical compositions of the invention inhibits development of a chronic HBV infection.

[0262] The subject to be treated with the SEPT9 inhibitor, such as the nucleic acid molecules, conjugate compounds or pharmaceutical compositions of the invention (or which prophylactically receives nucleic acid molecules, conjugate compounds or pharmaceutical compositions of the present invention) is preferably a human, more preferably a human patient who is HBsAg positive and/or HBeAg positive, even more preferably a human patient that is HBsAg positive and HBeAg positive.

[0263] Accordingly, the present invention relates to a method of treating a HBV infection, wherein the method comprises administering an effective amount of the SEPT9 inhibitor, such as the nucleic acid molecules, conjugate compounds or pharmaceutical compositions of the invention. The present invention further relates to a method of preventing liver cirrhosis and hepatocellular carcinoma caused by a chronic HBV infection.

[0264] The invention also provides for the use of a SEPT9 inhibitor, such as a nucleic acid molecule, a conjugate compound or a pharmaceutical composition of the invention for the manufacture of a medicament, in particular a medicament for use in the treatment of HBV infection or chronic HBV infection or reduction of the infectiousness of a HBV infected person. In preferred embodiments, the medicament is manufactured in a dosage form for subcutaneous administration.

[0265] The invention also provides for the use of a SEPT9 inhibitor, such as a nucleic acid molecule, a conjugate compound, the pharmaceutical composition of the invention for the manufacture of a medicament wherein the medicament is in a dosage form for intravenous administration.

[0266] The SEPT9 inhibitor, such as the nucleic acid molecule, conjugate or the pharmaceutical composition of the invention may be used in a combination therapy. For example, nucleic acid molecule, conjugate or the pharmaceutical composition of the invention may be combined with other anti-HBV agents such as interferon alpha-2b, interferon alpha-2a, and interferon alphacon-1 (pegylated and unpegylated), ribavirin, lamivudine (3TC), entecavir, tenofovir, telbivudine (LdT), adefovir, or other emerging anti-HBV agents such as a HBV RNA replication inhibitor, a HBsAg secretion inhibitor, a HBV capsid inhibitor, an antisense oligomer (e.g. as described in WO2012/145697, WO 2014/179629 and WO2017/216390), a siRNA (e.g. described in WO 2005/014806, WO 2012/024170, WO 2012/2055362, WO 2013/003520, WO 2013/159109, WO 2017/027350 and WO2017/015175), a HBV therapeutic vaccine, a HBV prophylactic vaccine, a HBV antibody therapy (monoclonal or polyclonal), or TLR 2, 3, 7, 8 or 9 agonists for the treatment and/or prophylaxis of HBV.

### EMBODIMENTS OF THE INVENTION

[0267] The following embodiments of the present invention may be used in combination with any other embodiments described herein. The definitions and explanations provided herein above, in particular in the sections “SUMMARY OF INVENTION”, “DEFINITIONS” and DETAILED DESCRIPTION OF THE INVENTION” apply mutatis mutandis to the following.
[0268] 1. A SEPT9 inhibitor for use in the in the treatment and/or prevention of Hepatitis B virus (HBV) infection.
[0269] 2. The SEPT9 inhibitor for the use of embodiment 1, wherein the SEPT9 inhibitor is administered in an effective amount.
[0270] 3. The SEPT9 inhibitor for the use of embodiment 1 or 2, wherein the HBV infection is a chronic infection.
[0271] 4. The SEPT9 inhibitor for the use of embodiments 1 to 3, wherein the SEPT9 inhibitor is capable of reducing cccDNA and/or pgRNA in an infected cell.
[0272] 5. The SEPT9 inhibitor for the use of any one of embodiments 1 to 4, wherein the SEPT9 inhibitor prevents or reduces the association of SEPT9 to cccDNA.
[0273] 6. The SEPT9 inhibitor for the use of embodiment 5, wherein said inhibitor is a small molecule that specifically binds to SEPT9 protein, wherein said inhibitor prevents or reduces association of SEPT9 protein to cccDNA.
[0274] 7. The SEPT9 inhibitor for the use of any one of embodiments 1 to 6, wherein said inhibitor is a nucleic acid molecule of 12-60 nucleotides in length comprising or consisting of a contiguous nucleotide sequence of at least 12 nucleotides in length which is at least 90% complementary to a mammalian SEPT9 target nucleic acid.
[0275] 8. The SEPT9 inhibitor for the use of embodiment 7, which is capable of reducing the level of the mammalian SEPT9 target nucleic acid.
[0276] 9. The SEPT9 inhibitor for the use of embodiment 7 or 8, wherein the mammalian SEPT9 target nucleic acid is RNA.
[0277] 10. The SEPT9 inhibitor for the use of embodiment 9, wherein the RNA is pre-mRNA.
[0278] 11. The SEPT9 inhibitor for the use of any one of embodiments 7 to 10, wherein the nucleic acid molecule is selected from the group consisting of antisense oligonucleotide, siRNA and shRNA.
[0279] 12. The SEPT9 inhibitor for the use of embodiment 11, wherein the nucleic acid molecule is a single stranded antisense oligonucleotide or a double stranded siRNA.
[0280] 13. The SEPT9 inhibitor for the use of any one of embodiments 7 to 12, wherein the mammalian SEPT9 target nucleic acid SEQ ID NO: 1.
[0281] 14. The SEPT9 inhibitor for the use of any one of embodiments 7 to 12, wherein the contiguous nucleotide sequence of the nucleic acid molecule is at least 98% complementary to the target nucleic acid of SEQ ID NO: 1 and SEQ ID NO: 2.
[0282] 15. The SEPT9 inhibitor for the use of any one of embodiments 7 to 12, wherein the contiguous nucleotide sequence of the nucleic acid molecule is at least 98% complementary to the target nucleic acid of SEQ ID NO: 1 and SEQ ID NO: 2 and SEQ ID NO: 3.
[0283] 16. The SEPT9 inhibitor for the use of any one of embodiments 1 to 15, wherein the cccDNA in an HBV infected cell is reduced by at least 50%, such as 60% when compared to a control.
[0284] 17. The SEPT9 inhibitor for the use of any one of embodiments 1 to 15, wherein the pgRNA in an HBV infected cell is reduced by at least 50%, such as 60%, when compared to a control
[0285] 18. The SEPT9 inhibitor for the use of any one of embodiments 7 to 16, wherein the mammalian SEPT9 target nucleic acid is reduced by at least 50%, such as 60%, when compared to a control.
[0286] 19. A nucleic acid molecule of 12 to 60 nucleotides in length which comprises or consists of a contiguous nucleotide sequence of 12 to 30 nucleotides in length wherein the contiguous nucleotide sequence is at least 90% complementary, such as 95%, such as 98%, such as fully complementary, to a mammalian SEPT9 target nucleic acid.
[0287] 20. The nucleic acid molecule of embodiment 19, wherein the nucleic acid molecule is chemically produced.
[0288] 21. The nucleic acid molecule of embodiment 19 or 20, wherein the mammalian SEPT9 target nucleic acid of SEQ ID NO: 1.
[0289] 22. The nucleic acid molecule of embodiment 19 or 20, wherein the contiguous nucleotide sequence is at least 98% complementary to the target nucleic acid of SEQ ID NO: 1 and SEQ ID NO: 2.
[0290] 23. The nucleic acid molecule of embodiment 19 or 20, wherein the contiguous nucleotide sequence is at least 98% complementary to the target nucleic acid of SEQ ID NO: 1 and SEQ ID NO: 2 and SEQ ID NO: 3.
[0291] 24. The nucleic acid molecule of any one of embodiments 19 to 22, wherein the nucleic acid molecule is 12 to 30 nucleotides in length.
[0292] 25. The nucleic acid molecule of any one of embodiments 19 to 24, wherein the nucleic acid molecule is a RNAi molecule, such as a double stranded siRNA or shRNA
[0293] 26. The nucleic acid molecule of any one of embodiments 19 to 24, wherein the nucleic acid molecule is a single stranded antisense oligonucleotide.
[0294] 27. The nucleic acid molecule of any one of embodiments 19 to 26, wherein the contiguous nucleotide sequence is fully complementary to a target nucleic acid sequence selected from Table 4.
[0295] 28. The nucleic acid molecule of embodiment 19 to 27, which is capable of hybridizing to a target nucleic acid of SEQ ID NO: 1 and SEQ ID NO: 2 with a ΔG° below -15 kcal.
[0296] 29. The nucleic acid molecule of any one of embodiments 19 to 28, wherein the contiguous nucleotide sequence comprises or consists of at least 14 contiguous nucleotides, particularly 15, 16, 17, 18, 19, 20, 21 or 22 contiguous nucleotides.
[0297] 30. The nucleic acid molecule of any one of embodiments 19 to 28, wherein the contiguous nucleotide sequence comprises or consists of from 14 to 22 nucleotides.
[0298] 31. The nucleic acid molecule of embodiment 30, wherein the contiguous nucleotide sequence comprises or consists of 16 to 20 nucleotides.
[0299] 32. The nucleic acid molecule of any one of embodiments 19 to 31, wherein the nucleic acid molecule comprises or consists of 14 to 25 nucleotides in length.
[0300] 33. The nucleic acid molecule of embodiment 32, wherein the nucleic acid molecule comprises or consists of at least one oligonucleotide strand of 16 to 22 nucleotides in length.
[0301] 34. The nucleic acid molecule of any one of embodiment 19 to 33, wherein the contiguous nucleotide sequence is fully complementary to a target sequence selected from the group consisting of SEQ ID NOs: 4, 5, 6 and 7.
[0302] 35. The nucleic acid molecule of any one of embodiments 19 to 34, wherein the contiguous nucleotide sequence has zero to three mismatches compared to the mammalian SEPT9 target nucleic acid it is complementary to.
[0303] 36. The nucleic acid molecule of embodiment 35, wherein the contiguous nucleotide sequence has one mismatch compared to the mammalian SEPT9 target nucleic acid.
[0304] 37. The nucleic acid molecule of embodiment 35, wherein the contiguous nucleotide sequence has two mismatches compared to the mammalian SEPT9 target nucleic acid.
[0305] 38. The nucleic acid molecule of embodiment 35, wherein the contiguous nucleotide sequence is fully complementary to mammalian SEPT9 target nucleic acid.
[0306] 39. The nucleic acid molecule of any one of embodiments 19 to 38, comprising one or more modified nucleosides.
[0307] 40. The nucleic acid molecule of embodiment 39, wherein the one or more modified nucleosides are high-affinity modified nucleosides.
[0308] 41. The nucleic acid molecule of embodiment 39 or 40, wherein the one or more modified nucleosides are 2′ sugar modified nucleosides.
[0309] 42. The nucleic acid molecule of embodiment 41, wherein the one or more 2′ sugar modified nucleosides are independently selected from the group consisting of 2′-O-alkyl-RNA, 2′-O-methyl-RNA, 2′-alkoxy-RNA, 2′-O-methoxyethyl-RNA, 2′-amino-DNA, 2′-fluoro-DNA, 2′-fluoro-ANA and LNA nucleosides.
[0310] 43. The nucleic acid molecule of any one of embodiments 39 to 42, wherein the one or more modified nucleosides are LNA nucleosides.
[0311] 44. The nucleic acid molecule of embodiment 43, wherein the modified LNA nucleosides are selected from the group consisting of oxy-LNA, amino-LNA, thio-LNA, cET, and ENA.
[0312] 45. The nucleic acid molecule of embodiment 43 or 44, wherein the modified LNA nucleosides are oxy-LNA with the following 2′-4′ bridge -O-CH₂-.
[0313] 46. The nucleic acid molecule of embodiment 45, wherein the oxy-LNA is beta-D-oxy-LNA.
[0314] 47. The nucleic acid molecule of embodiment 43 or 44, wherein the modified LNA nucleosides are cET with the following 2′-4′ bridge -O-CH(CH₃)-.
[0315] 48. The nucleic acid molecule of embodiment 47, wherein the cET is (S)cET, i.e. 6′(S)methyl-beta-D-oxy-LNA.
[0316] 49. The nucleic acid molecule of embodiment 43 or 44, wherein the LNA is ENA, with the following 2′ - 4′ bridge -O-CH₂-CH₂-.
[0317] 50. The nucleic acid molecule of any one of embodiments 19 to 49, wherein the nucleic acid molecule comprises at least one modified internucleoside linkage.
[0318] 51. The nucleic acid molecule of embodiment 50, wherein the at least one modified internucleoside linkage is a phosphorothioate internucleoside linkage.
[0319] 52. The nucleic acid molecule of any one of embodiments 19 to 51, wherein the nucleic acid molecule is an antisense oligonucleotide capable of recruiting RNase H.
[0320] 53. The nucleic acid molecule of embodiment 52, wherein the antisense oligonucleotide or the contiguous nucleotide sequence is a gapmer.
[0321] 54. The nucleic acid molecule of embodiment 53, wherein the antisense oligonucleotide or contiguous nucleotide sequence thereof consists of or comprises a gapmer of formula 5′-F-G-F′-3′, where region F and F′ independently comprise or consist of 1- 4 2′ sugar modified nucleosides and G is a region between 6 and 18 nucleosides which are capable of recruiting RNase H.
[0322] 55. The nucleic acid molecule of embodiment 54, wherein the 1- 4 2′ sugar modified nucleosides are independently selected from the group consisting of 2′-O-alkyl-RNA, 2′-O-methyl-RNA, 2′-alkoxy-RNA, 2′-O-methoxyethyl-RNA, 2′-amino-DNA, 2′-fluoro-DNA, arabino nucleic acid (ANA), 2′-fluoro-ANA and LNA nucleosides.
[0323] 56. The nucleic acid molecule of embodiment 54 or 55, wherein one or more of the 1- 4 2′ sugar modified nucleosides in region F and F′ are LNA nucleosides.
[0324] 57. The nucleic acid molecule of embodiment 56, wherein all the 1- 4 2′ sugar modified nucleosides in region F and F′ are LNA nucleosides.
[0325] 58. The nucleic acid molecule of any one of embodiments 55 to 57, wherein the LNA nucleosides are selected from beta-D-oxy-LNA, alpha-L-oxy-LNA, beta-D-amino-LNA, alpha-L-amino-LNA, beta-D-thio-LNA, alpha-L-thio-LNA, (S)cET, (R)cET beta-D-ENA and alpha-L-ENA.
[0326] 59. The nucleic acid molecule of any one of embodiments 55 to 58, wherein region F and F′ consist of identical LNA nucleosides.
[0327] 60. The nucleic acid molecule of any one of embodiments 55 to 59, wherein all the 2′ sugar modified nucleosides in region F and F′ are oxy-LNA nucleosides.
[0328] 61. The nucleic acid molecule of any one of embodiments 54 to 60, wherein the nucleosides in region G are DNA nucleosides.
[0329] 62. The nucleic acid molecule of embodiment 61, wherein region G consists of at least 75% DNA nucleosides.
[0330] 63. The nucleic acid molecule of embodiment 62, where all the nucleosides in region G are DNA nucleosides.
[0331] 64. A conjugate compound comprising a nucleic acid molecule according to any one of embodiments 19 to 63, and at least one conjugate moiety covalently attached to said nucleic acid molecule.
[0332] 65. The conjugate compound of embodiment 64, wherein the nucleic acid molecule is a double stranded siRNA and the conjugate moiety is covalently attached to the sense strand of the siRNA.
[0333] 66. The conjugate compound of embodiment 64 or 65, wherein the conjugate moiety is selected from carbohydrates, cell surface receptor ligands, drug substances, hormones, lipophilic substances, polymers, proteins, peptides, toxins, vitamins, viral proteins or combinations thereof.
[0334] 67. The conjugate compound of any one of embodiments 64 to 66, wherein the conjugate moiety is capable of binding to the asialoglycoprotein receptor.
[0335] 68. The conjugate compound of embodiment 67, wherein the conjugate moiety comprises at least one asialoglycoprotein receptor targeting moiety selected from group consisting of galactose, galactosamine, N-formyl-galactosamine, N-acetylgalactosamine, N-propionyl-galactosamine, N-n-butanoyl-galactosamine and N-isobutanoylgalactosamine.
[0336] 69. The conjugate compound of embodiment 68, wherein the asialoglycoprotein receptor targeting moiety is N-acetylgalactosamine (GaINAc).
[0337] 70. The conjugate compound of embodiment 68 or 69, wherein the conjugate moiety is mono-valent, di-valent, tri-valent or tetra-valent with respect to asialoglycoprotein receptor targeting moieties.
[0338] 71. The conjugate compound of embodiment 70, wherein the conjugate moiety consists of two to four terminal GaINAc moieties and a spacer linking each GaINAc moiety to a brancher molecule that can be conjugated to the antisense compound.
[0339] 72. The conjugate compound of embodiment 71, wherein the spacer is a PEG spacer.
[0340] 73. The conjugate compound of any one of embodiments 67 to 72, wherein the conjugate moiety is a tri-valent N-acetylgalactosamine (GaINAc) moiety.
[0341] 74. The conjugate compound of any one of embodiments 67 to 73, wherein the conjugate moiety is selected from one of the trivalent GaINAc moieties in FIG. 1A-1 to FIG. 1K.
[0342] 75. The conjugate compound of embodiment 74, wherein the conjugate moiety is the trivalent GalNAc moiety in FIG. 1D-1 or FIG. 1D-2, or a mixture of both.
[0343] 76. The conjugate compound of any one of embodiments 64 to 75, comprising a linker which is positioned between the nucleic acid molecule and the conjugate moiety.
[0344] 77. The conjugate compound of embodiment 76, wherein the linker is a physiologically labile linker.
[0345] 78. The conjugate compound of embodiment 77, wherein the physiologically labile linker is nuclease susceptible linker.
[0346] 79. The conjugate compound of embodiment 77 or 78, wherein the physiologically labile linker is composed of 2 to 5 consecutive phosphodiester linkages.
[0347] 80. The conjugate compound of any one of embodiments 67 to 79, which display improved cellular distribution between liver vs. kidney or improved cellular uptake into the liver of the conjugate compound as compared to an unconjugated nucleic acid.
[0348] 81. A pharmaceutical composition comprising a nucleic acid molecule of any one of embodiments 19 to 63, a conjugate compound of any one of embodiments 64 to 80, or acceptable salts thereof, and a pharmaceutically acceptable diluent, carrier, salt and/or adjuvant.
[0349] 82. A method for identifying a compound that prevents, ameliorates and/or inhibits a hepatitis B virus (HBV) infection, comprising:
   [0350] a. contacting a test compound with
      [0351] i. a SEPT9 polypeptide; or
      [0352] ii. a cell expressing SEPT9;
   [0353] b. measuring the expression and/or activity of SEPT9 in the presence or absence of said test compound; and
   [0354] c. identifying a compound that reduces the expression and/or activity SEPT9 and reduces cccDNA.
[0355] 83. An in vivo or in vitro method for modulating SEPT9 expression in a target cell which is expressing SEPT9, said method comprising administering the nucleic acid molecule of any one of embodiments 19 to 63, a conjugate compound of any one of embodiments 64 to 80, or the pharmaceutical composition of embodiment 81 in an effective amount to said cell.
[0356] 84. The method of embodiment 83, wherein the SEPT9 expression is reduced by at least 50%, or at least 60%, in the target cell compared to the level without any treatment or treated with a control.
[0357] 85. The method of embodiment 83, wherein the target cell is infected with HBV and the cccDNA in an HBV infected cell is reduced by at least 50%, or at least 60% in the HBV infected target cell compared to the level without any treatment or treated with a control.
[0358] 86. A method for treating or preventing a disease, such as HBV infection, comprising administering a therapeutically or prophylactically effective amount of the nucleic acid molecule any one of embodiments 19 to 63, a conjugate compound of any one of embodiments 64 to 80, or the pharmaceutical composition of embodiment 81 to a subject suffering from or susceptible to the disease.
[0359] 87. The nucleic acid molecule of any one of embodiments 19 to 63, or the conjugate compound of any one of embodiments 64 to 80 or the pharmaceutical composition of embodiment 81, for use as a medicament for treatment or prevention of a disease, such as HBV infection, in a subject.
[0360] 88. Use of the nucleic acid molecule any one of embodiments 19 to 63, or the conjugate compound of any one of embodiments 64 to 80 for the preparation of a medicament for treatment or prevention of a disease, such as HBV infection, in a subject.
[0361] 89. The method, the nucleic acid molecule, the conjugate compound or the use of any one of embodiments 86 to 88, wherein the subject is a mammal.
[0362] 90. The method, the nucleic acid molecule, the conjugate compound, or the use of embodiment 89, wherein the mammal is human.
[0363] 91. The conjugate compound of embodiment 74, wherein the conjugate moiety is the trivalent GaINAc moiety of FIG. 1B-1 or FIG. 1B-2, or a mixture of both.

[0364] The invention will now be illustrated by the following examples which have no limiting character.

### EXAMPLES

### Materials and Methods

### siRNA Sequences and Compounds

[0365] TABLE 5A

Human SEPT9 sequences targeted by the individual components of the siRNA pool

| SEQ ID NO: | SEPT9 target sequence 5′-3′ | Position on SEQ ID NO:1 | Exon |
|---|---|---|---|
| 4 | CAGAGCGGCUUGGGUAAAU | 206850-206876 | 5 |
| 5 | CGCACGAUAUUGAGGAGAA | 20679-206983+ 207671-207684 | Spanning exon 5 and 6 |
| 6 | GAGAUGAUCCCAUUUGCUG | 212412-212430 | 10 |
| 7 | GCAUCCACUUCGAGGCGUA | 217990-218008 | 12 |

[0366] The pool of siRNA (ON-TARGETplus SMART pool siRNA Cat. No. LU-006373-00-0005, Dharmacon) contains four individual siRNA molecules targeting the sequences listed in the above table.

TABLE 5B

Control compounds

| Name | Supplier | Order number | Sequence 5′ to 3′ sense strand | SEQ ID NO |
|---|---|---|---|---|
| Non-targeting negative control siRNA#1 | Dharmacon | #D-001810-01-05 | UGGUUUACAUGUCGACUAA | 8 |
| Hbx positive control | GA life science | Custom made | GCACUUCGCUUCACCUCUG | 9 |

### Oligonucleotide Synthesis

[0367] Oligonucleotide synthesis is generally known in the art. Below is a protocol which may be applied. The oligonucleotides of the present invention may have been produced by slightly varying methods in terms of apparatus, support and concentrations used.

[0368] Oligonucleotides are synthesized on uridine universal supports using the phosphoramidite approach on an Oligomaker 48 at 1 µmol scale. At the end of the synthesis, the oligonucleotides are cleaved from the solid support using aqueous ammonia for 5-16 hours at 60° C. The oligonucleotides are purified by reverse phase HPLC (RP-HPLC) or by solid phase extractions and characterized by UPLC, and the molecular mass is further confirmed by ESI-MS.

### Elongation of the Oligonucleotide

[0369] The coupling of β-cyanoethyl- phosphoramidites (DNA-A(Bz), DNA- G(ibu), DNA- C(Bz), DNA-T, LNA-5-methyl-C(Bz), LNA-A(Bz), LNA- G(dmf), or LNA-T) is performed by using a solution of 0.1 M of the 5′-O-DMT-protected amidite in acetonitrile and DCI (4,5-dicyanoimidazole) in acetonitrile (0.25 M) as activator. For the final cycle a phosphoramidite with desired modifications can be used, e.g. a C6 linker for attaching a conjugate group or a conjugate group as such. Thiolation for introduction of phosphorthioate linkages is carried out by using xanthane hydride (0.01 M in acetonitrile/pyridine 9:1). Phosphordiester linkages can be introduced using 0.02 M iodine in THF/Pyridine/water 7:2:1. The rest of the reagents are the ones typically used for oligonucleotide synthesis.

[0370] For post solid phase synthesis conjugation a commercially available C6 aminolinker phorphoramidite can be used in the last cycle of the solid phase synthesis and after deprotection and cleavage from the solid support the aminolinked deprotected oligonucleotide is isolated. The conjugates are introduced via activation of the functional group using standard synthesis methods.

### Purification by RP-HPLC

[0371] The crude compounds are purified by preparative RP-HPLC on a Phenomenex Jupiter C18 10 µm 150 × 10 mm column. 0.1 M ammonium acetate pH 8 and acetonitrile is used as buffers at a flow rate of 5 mL/min. The collected fractions are lyophilized to give the purified compound typically as a white solid.

### Abbreviations

[0372] DCI: 4,5-Dicyanoimidazole
[0373] DCM: Dichloromethane
[0374] DMF: Dimethylformamide
[0375] DMT: 4,4′-Dimethoxytrityl
[0376] THF: Tetrahydrofurane
[0377] Bz: Benzoyl
[0378] Ibu: Isobutyryl
[0379] RP-HPLC: Reverse phase high performance liquid chromatography

### Tₘ Assay

[0380] Oligonucleotide and RNA target (phosphate linked, PO) duplexes are diluted to 3 mM in 500 ml RNase-free water and mixed with 500 ml 2 × Tₘ-buffer (200 mM NaCl, 0.2 mM EDTA, 20 mM Naphosphate, pH 7.0). The solution is heated to 95° C. for 3 min and then allowed to anneal in room temperature for 30 min. The duplex melting temperatures (Tₘ) is measured on a Lambda 40 UV/VIS Spectrophotometer equipped with a Peltier temperature programmer PTP6 using PE Templab software (Perkin Elmer). The temperature is ramped up from 20° C. to 95° C. and then down to 25° C., recording absorption at 260 nm. First derivative and the local maximums of both the melting and annealing are used to assess the duplex Tₘ.

[0381] Clonal growth medium (dHCGM). dHCGM is a DMEM medium containing 100 U/ml Penicillin, 100 µg/ml Streptomycin, 20 mM Hepes, 44 mM NaHCO₃, 15 µg/ml L-proline, 0.25 µg/ml insulin, 50 nM Dexamethazone, 5 ng/ml EGF, 0.1 mM Asc-2P, 2% DMSO and 10% FBS (Ishida et al., 2015). Cells were cultured at 37° C. incubator in a humidified atmosphere with 5% CO2. Culture medium was replaced 24 h post-plating and every 2 days until harvest.

### ASOs Sequences and Compounds

[0382] TABLE 6

list of oligonucleotide motif sequences of the invention (indicated by SEQ ID NO), as well as specific oligonucleotide compounds of the invention (indicated by CMP ID NO) designed based on the motif sequence

| SEQ ID NO | CMP ID NO | Oligonucleotide Compound |
|---|---|---|
| 17 | 17_1 | AGacaagtagagGAGT |
| 18 | 18_1 | CTggtactcgtggtCA |

The heading “Oligonucleotide compound” in the table represents specific designs of a motif sequence. Capital letters are beta-D-oxy LNA nucleosides, lowercase letters are DNA nucleosides, all LNA C are 5-methyl cytosine, all internucleoside linkages are phosphorothioate internucleoside linkages (CMP ID NO = Compound ID NO)

### HBV Infected PHH Cells

[0383] Fresh primary human hepatocytes (PHH) were provided by PhoenixBio, Higashi-Hiroshima City, Japan (PXB-cells also described in Ishida et al 2015 Am J Pathol. 185(5):1275-85) in 70,000 cells/well in 96-well plate format.

[0384] Upon arrival the PHH were infected with an MOI of 2GE using HepG2 2.2.15-derived HBV (batch Z12) by incubating the PHH cells with HBV in 4% (v/v) PEG in PHH medium for 16 hours. The cells were then washed three times with PBS and cultured a humidified atmosphere with 5% CO₂ in fresh PHH medium consisting of DMEM (GIBCO, Cat# 21885) supplemented with 10% (v/v) heat-inactivated fetal bovine serum (GIBCO, Cat# 10082), 2% (v/v) DMSO, 1% (v/v) Penicillin/Streptomycin (GIBCO, Cat# 15140-148), 20 mM HEPES (GIBCO, Cat# 15630-080), 44 mM NaHCO₃ (Wako, Cat# 195-14515), 15 ug/ml L-proline (MP-Biomedicals, Cat# 0219472825), 0.25 µg/ml Insulin (Sigma, Cat# I1882), 50 nM Dexamethasone (Sigma, Cat# D8893), 5 ng/ml EGF (Sigma, Cat# E9644), and 0.1 mM L-Ascorbic acid 2-phosphate (Wako, Cat# 013-12061). Cells were cultured at 37° C. incubator in a humidified atmosphere with 5% CO₂. Culture medium was replaced 24 hours post-plating and three times a week until harvest.

### siRNA Transfection

[0385] Four days post-infection the cells were transfected with the SEPT9 siRNA pool (see Table 5A) in triplicates. No drug controls (NDC), negative control siRNA and HBx siRNA were included as controls (See Table 5B above).

[0386] Per well a transfection mixture was prepared with 2 µl of either negative control siRNA (stock concentration 1 µM), SEPT9 siRNA pool (stock concentration 1 uM), HBx control siRNA (stock concentration 0.12 µM) or H2O (NDC) with 18.2 µl OptiMEM (Thermo Fisher Scientific Reduced Serum media) and 0.6 µl Lipofectamine® RNAiMAX Transfection Reagent (Thermofisher Scientific catalog No. 13778). The transfection mixture was mixed and incubated at room temperature 5 minutes prior to transfection. Prior to transfection the medium was removed from the PHH cells and replaced by 100 µl/well William’s E Medium + GlutaMAX™ (Gibco, #32551) supplemented with HepaRG supplement without P/S (Biopredic International, #ADD711C). 20 µl of transfection mix was added to each well yielding a final concentration of 16 nM for the negative control siRNA or SEPT9 siRNA pool, or 1.92 nM for the HBx control siRNA and the plates gently rocked before placing into the incubator. The medium was replaced with PHH medium after 6 hours. The siRNA treatment was repeated on day 6 post-infection as described above. On day 8 post-infection the supernatants were harvested and stored at -20° C. HBsAg and HBeAg can be determined from the supernatants if desired.

### LNA Treatment

[0387] Two LNA master mix plates from a 500 µM stock were prepared. For LNA treatment at a final concentration of 25 µM, 200 uL of a 500 µM stock LNA is prepared in the first master mix plate. A second master mix plate including SEPT9 LNAs at 100 µM was prepared for LNA treatment at a final concentration of 5 µM, mixing 40 µL of each SEPT9 LNA at 500 µM and 160 µL of PBS.

[0388] Four days post-infection the cells were treated with SEPT9 LNAs at final concentration of 25 µM (see Table 6) in either duplicate or triplicates or with PBS as no drug control (NDC). Prior to the LNA treatment, the old medium was removed from the cells and replaced by 114 µl/well of fresh PHH medium. Per well, 6 µL of each SEPT9 LNA either at 500 uM or PBS as NDC were added to the 114 µL PHH medium. The same treatment was repeted 3 times at day 4, 11 and 18 post-infection. Cell culture medium was changed with fresh one every three days at day 7, 14 and 21 post infection.

[0389] For the quantification of cccDNA, the infected cells were treated with entecavir (ETV) at 10 nM final concentration from day 7 to day 21 post infection. Fresh ETV treatment was repeated 5 times at day 7, 11, 14, 18 and 21 post infection. This ETV treatment was used to inhibit the synthesis of new viral DNA intermediates and to detect specifically HBV cccDNA sequences.

### Measurement of HBV Antigen Expression

[0390] HBV antigen expression and secretion can be measured in the collected supernatants if desired. The HBV propagation parameters, HBsAg and HBeAg levels, are measured using CLIA ELISA Kits (Autobio Diagnostic #CL0310-2, #CL0312-2), according to the manufacturer’s protocol. Briefly, 25 µL of supernatant per well is transferred to the respective antibody coated microtiter plate and 25 µL of enzyme conjugate reagent is added. The plate is incubated for 60 min on a shaker at room temperature before the wells are washed five times with washing buffer using an automatic washer. 25 µL of substrate A and B were added to each well. The plates are incubated on a shaker for 10 min at room temperature before luminescence is measured using an EnVision® luminescence reader (Perkin Elmer).

### Cell Viability Measurements

[0391] The cell viability was measured on the supernatant free cells by the Cell Counting Kit - 8 (CCK8 from Sigma Aldrich, #96992). For the measurement the CCK8 reagent was diluted 1:10 in normal culture medium and 100 µl/well added to the cells. After 1 h incubation in the incubator 80 µl of the supernatants were transferred to a clear flat bottom 96 well plate, and the absorbance at 450 nm was read using a microplate reader (Tecan). Absorbance values were normalized to the NDC which was set at 100% to calculate the relative cell viabilities.

[0392] Cell viability measurements are used to confirm that any reduction in the viral parameters is not the cause of cell death, the closer the value is to 100% the lower the toxicity. LNA treatment giving cellular viability values equal or below 20% to the NDC were excluded from further analysis.

### Real-Time PCR for Measuring SEPT9 mRNA Expression and the Viral Parameters pgRNA, cccDNA and HBV DNA Quantification

[0393] Following cell viability determination the cells were washed with PBS once. For siRNA treatment cells were lysed with 50 µl/well lysis solution from the TaqMan® Gene Expression Cells-to-CT™ Kit (Thermo Fisher Scientific, #AM 1729) and stored at -80° C. For cells treated with LNAs, total RNA was extracted using a MagNA Pure robot and the MagNA Pure 96 Cellular RNA Large Volume Kit (Roche, #05467535001) according to the manufacturer’s protocol. For quantification of SEPT9 RNA and viral pgRNA levels and the normalization control, GUS B, the TaqMan® RNA-to-Ct™ 1-Step Kit (Life Technologies, #4392656) has been used. For each reaction 2 or 4 µl of cell lysate, 0.5 µl 20x SEPT9 Taqman primer/probe, 0.5 µl 20x GUS B Taqman primer/probe, 5 µl 2x TaqMan® RT-PCR Mix, 0.25 µl 40x TaqMan® RT Enzyme Mix, and 1.75 µl DEPC-treated water is used. Primers used for GUS B RNA and target mRNA quantification are listed in Table 8. Technical replicates are run for each sample and minus RT controls included to evaluate potential amplification due to DNA present.

[0394] The target mRNA expression levels, as well as the viral pgRNA, were quantified in technical duplicates by RT-qPCR using a QuantStudio 12 K Flex (Applied Biosystems) with the following protocol, 48° C. for 15 min, 95° C. for 10 min, then 40 cycles with 95° C. for 15 seconds, and 60° C. for 60 seconds.

[0395] SEPT9 mRNA and pgRNA expression levels were analyzed using the comparative cycle threshold 2-ΔΔCt method normalized to the reference gene GUS B and non-transfected cells. The expression levels in siRNA-treated cells are presented as % of the average no-drug control samples (i.e. the lower the value the larger the inhibition/reduction). In LNA-treated cells, the expression levels are presented as inhibitory effect compared to non-treated cells (NDC) set as 100% and is expressed as a percentage of the mean + SD from two independent biological replicates are measured. For cccDNA quantification, total DNA was extracted from HBV infected Primary Human Hepatocytes treated with siRNA or with LNAs . Prior to the cccDNA qPCR analysis, a fraction of the siRNA treated cell lysate was digested with T5 enzyme (10 U/500 ng DNA; New England Biolabs, #M0363L) to remove viral DNA intermediates and to quantify the cccDNA molecule only. T5 digestion was done at 37° C. for 30 min. T5 digestion was not applied on LNA treated cell lysates to avoid qPCR interference in the assay To remove HBV DNA intermediates and quantify cccDNA level in LNA treated cells, cells were treated with entecavir (10 nM) for 3 weeks as described in LNA treatment section

[0396] For the quantification of cccDNA in siRNA-treated cells, each reaction mix per well contained 2 µl T5-digested cell lysate, 0.5 µl 20x cccDNA_DANDRI Taqman primer/probe (Life Technologies, custom #AI1RW7N, FAM-dye listed in the Table below), 5 µl TaqMan® Fast Advanced Master Mix (Applied Biosystems, #4444557) and 2.5 µl DEPC-treated water were used. Technical triplicates were run for each sample.

Primers for siRNA-treated cells

| Primer name | Sequence | SEQ ID |
|---|---|---|
| CCCDNA_DANDRI_F | CCGTGTGCACTTCGCTTCA | 10 |
| CCCDNA_DANDRI_R | GCACAGCTTGGAGGCTTGA | 11 |
| CCCDNA_DANDRI_M | 5′-[6FAM]CATGGAGACCACCGTGAACGCCC[BHQ1]-3′ | 12 |
| Primers for LNA-treated cells | | |
| CCCDNA_Fwd | 5′- CGTCTGTGCCTTCTCATCTGC-3′ | 13 |
| CCCDNA_Rev | 5′- GCACAGCTTGGAGGCTTGAA -3′ | 14 |
| Mito_Fwd | CCGTCTGAACTATCCTGCCC | 15 |
| Mito_Rev | GCCGTAGTCGGTGTACTCGT | 16 |

[0397] For the quantification of cccDNA in LNA-treated cells by qPCR, a master mix of 16 uL/well, with 10 ul 2x Fast SYBR™ Green Master Mix (Applied Biosystems, # 4385614), 2 ul cccDNA Primer Mix (1 uM of each forward and reverse), and 4 ul nuclease-free water per well is prepared. A master mix with 10 ul 2x Fast SYBR™ Green Master Mix (Applied Biosystems, # 4385614), 2 ul mitochondrial genome primer mix (1 uM of each forward and reverse), and 4 ul nuclease-free water per well is also prepared for normalization of the cccDNA.

[0398] For quantification of intracellular HBV DNA and the normalization control, human hemoglobin beta (HBB), each reaction mix contained 2 µl undigested cell lysate, 0.5 µl 20x HBV Taqman primer/probe (Life Technologies, #Pa03453406_s1, FAM-dye), 0.5 µl 20x HBB Taqman primer/probe (Life Technologies, #Hs00758889_s1, VIC-dye), 5 µl TaqMan® Fast Advanced Master Mix (Applied Biosystems, #4444557) and 2 µl DEPC-treated water were used. Technical triplicates were run for each sample.

[0399] The qPCR was run on the QuantStudio™ K12 Flex with standard settings for the fast heating block (95° C. for 20 seconds, then 40 cycles with 95° C. for 1 second and 60 C for 20 seconds).

[0400] Any outliers were removed from the data set by excluding values with more than 0.9 difference to the median Ct of all the three biological replicates for each treatment condition. Fold changes of cccDNA (siRNA and LNA treated cells) and total HBV DNA (only siRNA treated cells) were determined from the Ct values via the 2^{-ddCT} method and normalized to the HBB or mitochondrial DNA as housekeeping genes. For siRNA-treated cells, expression levels are presented as % of the average no drug control samples (i.e. the lower the value the larger the inhibition/reduction). For LNA treated cells, the inhibitory effect on cccDNA was expressed as a percentage of the mean +/-SD from three independent biological replicates compared to non-treated cells (NDC) set as 100%.

TABLE 8

GUS B and SEPT9 mRNA qPCR primers (Thermo Fisher Scientific)
SEPT9 (FAM): Hs00246396_m1
Housekeeping gene primers GUS B (VIC): Hs00939627_m1
pgRNA (FAM): AILIKX5

### Example 1: Measurement of the Reduction of SEPT9 mRNA, HBV Intracellular DNA and cccDNA in HBV Infected PHH Cells Resulting From siRNA Treatment

[0401] In the following experiment, the effect of SEPT9 knock-down on the HBV parameters, HBV DNA and cccDNA, was tested.

[0402] HBV infected PHH cells were treated with the pool of siRNAs from Dharmacon (LU-006373-00-0005) as described in the Materials and Methods section “siRNA transfection”.

[0403] Following the 4 days-treatment, SEPT9 mRNA, cccDNA and intracellular HBV DNA were measured by qPCR as described in the Materials and Methods section “Real-time PCR for measuring SEPT9 mRNA expression and the viral parameters pgRNA, cccDNA, and HBV DNA”.

[0404] The results are shown in Table 9 as % of the average no drug control samples (i.e. the lower the value the larger the inhibition/reduction).

TABLE 9

Effect on HBV parameters following knockdown of SEPT9 with pool of siRNA. Values are given as the average of biological and technical triplicates

| Treatment | SEPT9 mRNA | | HBV intracellular DNA | | cccDNA | |
|---|---|---|---|---|---|---|
| | Mean | SD | Mean | SD | Mean | SD |
| SEPT9 siRNA | 17 | 3 | 50 | 16 | 34 | 2 |
| HBx positive control | ND | ND | 53 | 35 | 65 | 50 |
| siRNA negative control | ND | ND | 123 | 16 | 71 | 4 |

ND= not determined

[0405] From this it can be seen that the SEPT9 siRNA pool is capable of reducing SEPT9 mRNA, cccDNA as well as HBV DNA quite efficiently. The positive control reduced intracellular HBV DNA as expected but had no effect on cccDNA when compared to the negative control.

### Example 2: Measurement of the Reduction of SEPT9 mRNA, HBV Intracellular pgRNA and cccDNA in HBV Infected PHH Cells Resulting From LNA Treatment

[0406] In the following experiment, the effect of SEPT9 knock-down on the HBV parameters, HBV DNA and cccDNA, was tested.

[0407] HBV infected PHH cells were treated with SEPT9 naked LNAs (see Table 6) as described in the Materials and Methods section “LNA treatment”.

[0408] Following 21 days-treatment, SEPT9 mRNA, cccDNA, and intracellular HBV pgRNA were measured by qPCR as described in the Materials and Methods section “Real-time PCR for measuring SEPT9 mRNA expression and the viral parameters pgRNA, cccDNA, and HBV DNA”. The results are shown in Table 10 as inhibitory effect compared to non-treated cells (NDC) set as 100% and are expressed as a percentage of the mean + SD from two independent biological replicates are measured.

TABLE 10

Effect on HBV parameters following knockdown of SEPT9 with naked LNAs. Values are given as the average of either two or three biological replicates. Data show the effect with LNA at a final concentration of 25 mM

| CMP ID | SEPTIN9 mRNA | | pgRNA | | cccDNA | |
|---|---|---|---|---|---|---|
| | Mean % | SD | Mean % | SD | Mean % | SD |
| 17_1 | 24.05% | 1.34% | 87.91% | 2.98% | 66.20% | 5.62% |
| 18_1 | 52.01% | 3.29% | 29.25% | 3.70% | 69.34% | 9.30% |
| NDC | 100.00% | 0.00% | 98.73% | 1.27% | 100.00% | 0.00% |

*Non-treated cells

[0409] From this, it can be seen that SEPT9 LNAs are capable of sensibly reducing SEPT9 mRNA expression resulting in a quite efficient reduction in expression level for both pgRNA and cccDNA.

The application's sequence listing, which the Patent Office published only in electronic form, follows.

SEQUENCE LISTING (18 sequences)

SEQ ID NO: 1 - DNA, 220028 bp, homo sapiens
aattagtcacttcttcctctgtacgttggaaacaccgctttatcgtggagactttaaggatatccaagtagagagaattcttccgtgcaagttttgcatcctctcaccactgcctgcgttacccgagttgtaaagggcggctccctgtgtctgccccgctgcaccgatacaccgagctgcgcacggtgcccagcgcagggagaacaaatgatcatctgtccaacgcgcccatttacaggtgaggaaactaaggctccaactcaatcgacgcactctgcccttttgattaccagaaaagtagcaggacaggtgtcctgtcccgccctaccccggcccactaagccggcaccccggctccgacccccggctgtgcccggcgccgccgcggtgcccggcgccgccgcctcgcccggcggggccgcccggagcgcccgcacctccgcccgcttccacctggccgggcccgccccgcccggactcgggactgggaagtgcggcgactcccggaaccagccattggcgccagcgcggggagctgggggtgcagagctgcgggcgcggcgggccacgcaggcggcccccacccccggcctggcctggtctggtctggtctgcgctgccgcgcgggggcgccccctcccaggcccggcgcccgccagccccgctccgccaggtgcagcgcagcgcaggggtgggcgggggtggggctcggcgcgcacgttcacggggcggggagggggcgggtcaggggcgggaccacagccggctgggccggggttctatgcgcatctccggggaggggcggggcgggggcggggccggggcggggcccggtcggtgcactccagacggcgggccgccccctcttcccgccttcctactaccggcccaggattagcgccctgggagcgcgcgccccgctgcctcgccgccacactttcctgggagcggcggccacggaggcaccatgaagaagtcttactcaggtgggcttcgcgcccggggtggggaggggtcggtgtcccgggaccagcgctgctcacctgagtgcctgcggccgggagtggcgaggcgcccccggagctgagcgagtccccgcggcgggcacactgcaggtcgagttcctcccaggacagggccgctgtcgggccgctttcgacctgagccgaccgtcccctgcgctgtctccagcccttgctcgagtgtcggaggggctgccctgggggacgctccctcttcctcgccccttgcaccctcgcaggaatcgctgactttccaggtcggccgggtgctttgggtccctgtgcgtctgtgtgggtgaatggggtcggggctaggtggaggggtgtccttgggttcagcctctagggctggtggtccaggccgcagcatcctttcttcggattctcttcggtttctcctctacttagtggggcacgggacggcctccagatgggaccgtccagcagcgcccaaacttggcgactcgggttcacgttttgcgctcaggacgccgcccgcggctgacatcctcactccaccctagcagggcccgccttaagtaggcgaagggggcctgacttgggcctcaccatgagccggttcaggagctttcatttcataagaggctcccgctctggcactctgaagttccatttcacagatgggcacaccgaggccacaagggcaggttaagagaaatccagatcttcattatttgtcttttccttccttttttttttcctttgtggttttctccaaaggatccaggcaggcaggatcctttgtcctcctcagtcctcaaattataaatagcgtctcctcttctaaatctagaaaccgtttgtttaatgtccctcctttaattcattcagatagaaaggtacctgccaaggatccatgaattaatttttattgataggagaacagaatcatgggccttagttggaggtgaaggagtcatcggggccatccccctgcctttgggccattgtcggtttcctctggctttccatatttaggaaccaaaatgagtgataaagtaccttgtctcaaagaggattactcagaacttccccgaaaatacccttctgggtcagtagcttagaatttcaactttcacccggttgttgcgaacaagatggccctctacgcacccggagcacagctctgtcaggagcgtgggtgggttggtgtgctggtgggcgggagcgggcttccaggtggcacatgcttggttttggcaccggggcttcctccccaacatgctccaaatacttgagattgttgtggggatcgcgcggtgcatggccctttccaggggatctctagcccgcccagggagggccctttgcccttggtttcttacactttacctcccactggtgggtccagacagtgggggtgaccggggtcctcccaggtcgtgggtcctgggttttttctgcggagaccctcctgcacagatgccggaagggccctgaggcaggcttggagtctctgcacctgcggcttactgggaggtggggagaccatcacttgtccttttctcctctcctccacacacacctaccccacccctcactgggtttcttttttttttttttttttaaaaaaaaggacagaaccttttgcagtaggtggaagtagagtttgtggagtgagcaggaaccaactcttgtacagcagcctcggtgcctccttgtgtttacctaaaggggcaggcccctctgaggatgggggaagggagggctcagaccatttctggtttgctccctgcttggcagtggcccaaggtgtgctgggtcactgtgttgcagttgtatggagtgggactggagggggctgatggtgggggtggcctcttgccctcattctgagtgtcctggagctgtcttggcaccagcccttttccgggtacgggcactcgcaggagtcaggctgaccccccaacaagccatcgacaccatgaaattaaggaaagcagcaaaagatgttaaaaatcccccaaggctctgacaatccaaggacaacaggaaggtctttattttttcatctagactgtgcgggattattgcttccagacctgtatgtgggcttcagaataaacggaatgaccataatgttgttcccggtagacctggtttgaacattcgtgagcctctgaaaaggagaaagattttagaaggatgtgttggggcaatctcaagtaccgtgggtctatagacagtcatcgaagacactttatgtgctgggcacacatggccaagtctgagtgggtacagaaatggtaatgagatatagtccttgcctgcagagaacttacattctcaccgggagtcaggatgagggcgagacaccagctcattaacacccttccctcctgagcagttcagcctccaaatactacaggaatgccccggaggttttaggtggaggtgagattgagctgggccttgaggaaggagaagtcttgagtagtggagaataaaaagggacttggccaggtgcgcttgaagtcccagctactcaggaggctgagacacgaggatcgcttgagcccaggaggctactcaggaggctgagacacgaggatcgcttgagcccaggaggctactcaggaggctgagacaggaggatcgcttgaagccaggagttcaaggctgcagccctgtgacagcgcctggaaatagacacggcactccagcctgggtggcgtcatgagaccccatctgtaagaaggtcttttccaatgcggaaggcagcaagggcccacacagggcagctgcaggatccagggggacactggggacaggttctctctggcagctccactgctgctccaggctttcccgattgcctcacccggccttccaatggggtggaggtagtggtagtctacaggcagtgtggtccagtggttacacttgggggctcagagccgccagccccttgggattaaatctcaccaggctgcgcctctccctgtggcacaaggttctcacctcatgcatctcatttgcctcatttgtttttttgtgtgtgtggtgttttttaattttatttatttatttatttttgagacggagtctcactctgtctcccaggctggagtgcaatggcatgatctcagcttactgcaacctccgcctcccaggttcaagtgattctcctgcctcagcctcctgagtggctgggattgtaggaacgtgccactgcgcccagctaatttttatatttttactagagatggggtttcaccatgttggtcaggctgatctcgaactcctgacctcgtgatctgcctgccttggcctcccaaagtgctgtgattacaggcatgagccaccacgcccagcctgcctcatttgttaaatgggacagtgctatgttgttgtaaaggttaaacgagttcatatttgaaaaagctgagaaatgcctgctctgtaacctgttagctgctgtcatgatcatgattgtcattgacaggaggatggagaaggctggggttacgccattgctaggacgttccagaagcctccatgatcttcccttactgtggtcagagcatggtgcagggtctctcccccagcccctcagcactggagccagctgcactgtacccgccctggctctctaggttctgagttttgggactccctttgcatactaggtcacatggaacttgccgtcattcccaggctcccctggaaactctctgtgggtggcagcggcaggaggacttacccgaggccgatgagccacagaagcgggactgaggttgcgtcacacccctactggcacctgggaattactctggagattctttttttattttttatttttttgagatggagtcttgctctgttgcccaggctggagtgcagtggcacgatctcggttcactgcaacctctgcctcccaggttcaagcaattctcatgcctcagcctcctgagtagctgggattacaggcatgtgccaccgtgcccagctaatttttgtattttttagtagagatggggttttaccatactggccaggctggtctcgaactccggacctcaggtgatccacccgcctcagcctcccaaagtgctgggatcacaggcatgagccaccgtgcccagccactctggagtttctctgtggctttcaggagattcctgaaggggcaccagccacgattaaaaagctctatgctgtcgtgacttctgagtcctgggcagggagggaggctgcacccacacaggaagcagcttctgccgtgattcagtgtgctggctcgccgtggtggacagggctgcaccctcacccagcgccccgggagctgacttacgggaagggcaaggaattgcaccctcagagaacacttccccagtcagctaacccggtgacaggcgagcgtgggaagggcacaagcacagggtttcttcctcttctcccccagccccgtctccgcgcctgttctcgctgcctcttgcctcctcacgtccaagcttgtctgctctggcgcattcaggggacctggactggagagaaaaagccacctcgtacggttagtctgtggctctgtctgacttgtgtcctccgccgaggcccctcagttgtgagacagctggctgagcctaagtcctggggccagccctctccctagtctgttgcaaaggtagaaaggcatgcccaggcaggggccacctgccctgcccgctcacgccagaccgcaggcacttgcccgtcagatctccccggcctgcccagagggattctgatagccgagggcaatgcacctggcagcggagcattgcgtttgcgacagtccaccttcttcctggaaccaccccccacaagtgtgaccagctcaagccaggacaggtacagggggacccaggattgccacttaggggcagtggtctggaatccaggtccaggtgacatgggagccaaccctctgcttggagatcccaggtgggtgtttgcagaggacatctcacttgaggacccatggaaggggacacttcccaccccctacctggtccttgggctgccctcctctgacactctcctgccatcccaggcagccctgacagccccatgtgactgggacctagaggtggcccctgtttccgccccagtgtttgtccacaggcagtgttgcgtgggctctgaagtttgcctaagatggacctgataaggggagttcagtacacatcagtgcaggcccggccagggggtgatgatggcagttcctgggcagatccagctggctttagggtaggaggggctccagagagaggctccaggcccctaggggtgtgaacctttggggtgaggcgggaagtgacgcgctgggttcctgcgcctctgtttgttggagctattaccttggaaacatcccagctctaggcggttgccagggatttatggggatcagtgggtgccaatccctgggtgaagccctcggggcttgtacacagcacacagcgctgtggccccatggctcactttgctgtgtgaagtggctcagtctccgggagagtccttagccaggcaggcctgacggcaactgccaggtcatggtgatctggaatcgctgaccaaagggagtcagtcctggtgggtggagggacttggtgggcagccatcgtgatgccaggcatggggatcgtgtgtcacccaggcctgtgggtgccgagcttctgtgggagcagtgaagtgcccccgtggccgatgggctggtcacccctgcccctttcctgatgtgacagttgtgcctgggccccgggaaatttgccaggaggcctggcattggcctgctctactggagcggccctgctgagctgtgagctgcccgtctccctgaggttcctagcccatttcaactctccatgtggatttggtcattcattccagaagcgtctgccgggcgctgctgagtgtcaggttctgtttgcctcctctcctgtacgctggaggctctgggcaccagctctgcagggtggcctggccttgggtctccagggtagagcatggcactctctgctcccagcccagtttctctctgctttatctccctgaccccaccctgggcatgggcccatttgcagcccctgtgaagggagacattgagctgttgctggcagaggaggggcggctcctgggcactgcttgccaatggcctctcggcagctctgtgacagctgagctttgttcccagcctaatctgacctggttctccaaagcatgactgttggcagcctgaaaacctccaggacaggaaacaggagtggcgcagggaatgtaagatgatcccagcttcaagtcactgggcggcccttagacccaggctgcctgctgtctctggcaggaactcaagtcgctggtcatcctcagagcggtgttggcccggggccttcagtggcctttgtgtctgggtgagaggaaccctggatggccactctgccctgagtgtgtgggtccccagaagtgctgggttagggggcacggagggccagaaagtcccctttggagcgctggactctctcgctgactcctaccccaccccggcctggggtttcagagaaggggtccaggcaggagtgtcatcttttctcaatggggatgtggcttcagtctctgtccaggtgggtgcattgctctctttccggctcctcccaggctgcttaaatgacctgtgacgaggcctgcgccatggccggggccctctgcttttcccagcgctgcacctgggaaccaggggttgggccccggaagccgaggatgtccctgaatgccatgcctgggcacctgtcctggccaggcgaggcgtgttggggcagcggctgagatgggagcagcagcattgcctgccaggtttgagatgggccccgggtgagtgtggttaccaggaagggctgggcagagcaggcgggtgggccgcccctggggccttgttccgcagatcaacctgatccgcaccctggggccggggcttcctttcacagccttcccatgaactatggctcctgtttccatcccaaatcagatcccagaagaggaataatgtccatgtaacccaagccagttggaagtgggttacatccaacccctgtcatcttccagcttgttaaggacttgactaactcaacccagagggatttggagggttgtctgcaaaacccactaataacagggaactttagctctgtagccacagggtctacagaggtgtcgggctgtcgggttattgctgggaggtgagccggtggcgtagacaccatggaggcaccggtagtggaagagctgcaagtgcacacagaggccggcaccgaggggcggggaggaggaggtggtggatttctcgccagtgttggcatcatgttgcctccagcatcagagacccaaggtgtggctgaccttggctggggcgatgagtcattggatagcagagccttcctggtagctgggggttaacgctttaactgccgggactttgtattatgccgcttcttttttttgttttgtttggtttggtttggtttggtttttgagacggagtctcactctgtcacccaggctggagtgtggtggctcaatcttggctcactgcaacctctgcctcctgggttcaagcaattctcctgcctcagcctcctgaatagctgggattacaggcacgcgccaccatgcctggctaatttttgtatttttagtagagatggggtttcgccatgttggccgggttggtttcaaactcctgacctcaggtgatccacctgccccggcctcccaaagtgctgggattacaggcatgagctaccgcgcccagcttgcatttatgcttttttttttttttttttgagatggagtttcgctcttgttgcccaggctggagtgcaaaggcgcgatctcagctcactgcaacctccacctcccgggttcaagcgattctcttgcctcagcctcccaagtagctgggattacaggcctgcgtcaccatgcccggctaattttgtatttttagtacagacggggtgtccccatgttggtcaggctggtctcgaactcccgacctcaggtgatccgcccgccttggcctcccaaagtgctgggattacaggcgtgagccaccgcacccggcctatgctttttattattattatttaattttttaaggaaagcaatctaaactgtacactgtatcttttctttctcttttgctttttgttgtcagttttctgtattacttattgccaaacaacatgaacaggaaattgaaaggaaaacttcaacaatcattggctgtagcatttcttctgtgttccattcagtgcttgtctcctcaggaacatgacatagggtttgatttaattatgaaaggcgtatattttcagagttttatactccccatagaatgaatgttgaattctgttcttttcacttgaaattagatctcaggcatggatttcatgattatcactataatggctcttcagagtggacattgcatcttgtagggaaccaccctctccccagctgctggtgtggacgctcctccttgatggtgtgggtctgggcccctgaagggtggtgtcctgagtaaagatgttacagtagccatgcttatagctttgggcctggggctaggtggagactggcttcaaccctagagcttgctgtcttaaaataaattcttttttttttttttttgagatggagtctcgctctgttgcccaggctggagtgcagtggcgcgatctccgctcactgcaagctccgcctcccgggttcacaccattctcctgcctcagcatcccgcatagctgggactacaggcacccgcccccacgcccggctaattttttgtatttttttagtagaggcggggtttcaccatgttagccaggatggtctcaatcttctgacctcgtgatccactcgcctcagcctccaaagtgctgggataaaataaattcttagggccgggagcggtggctcacacctgtaatcccagcactttgagaggccgaggcgggcagatcacaaggtcagaagatcgagaccatggtgaaaccccgtctctactaaaaatacaaaaaattagctgggtgcagtggcgggcgcctgtagtcccagctactcgggaggctgaggcaggagaatggcatgaacccggaaggcggagcttgcagtgagccgagattgcgccagtgcactccagcctgggcgacagagtgagaccctgtctcataaataaataaataaataaataaataaataaattcttatacccacttgcattatttattattattattattaaacagggtcttgctgtgttgcccaggttggagtgcagtggcgtgatcatgacctcccagtctcgacctcccagtttcaattggtcctcccttctcagcctcctgagtagctgggactacaggtgtgcgctgcatgcctggctaattttttttttttttttttttttgagacagagtcttactctgttgcccaggctggagtgccgtggtgcaatctcggctcactgcaacccccggctcctggattaaagcaattctcctgcctcagcctcctgaatagctgcgattacaggcatgtgccgccacacctggctaatttttgtatttttagtagggacggggtttcaccatgttggtcaggctggtctcaaactcctgacctcgtgatccacctgccttggcctcccaaagtgctgggattacaggtgggagccaccgcgcctggcatgcctggctaatttttaaaaaatttttgtagcagccgggcgcggtggctcatgcctgtaatcctagcactttgggaggccaaggaggtcgggagttcgagaccagcctgaccaacatggagaaaccctgtctctactaaaactacaaaattagctgggcatggtggcacatgcctgtaatcccagctactcaggaggctgaggcaggagaattgcttgaatctaggaggcgggggttgcagtgagctgagatcgtgccacggcactccagcctgggcaaagagagtgaaactccgtctcaaaaaatttttgtttttgtttttgtagcgacagggtcttgttttgttgttgcctaggctggtactgaatttccagcctcaagcgatcctcctgcctcagcctcccaaagcgctgggagtacaggcgtgagtcactgtgcctggcctccacttgctttggctgcctttctctgtcttaggtaaccatacatttctccaggtaattaagaaaagattgcgcatgatgagtcccttttctggtatttctgggattgcccccaaaaccagacaagtgttcttaccttgacattttattaagactttaatgaacagaatgccgtttgccctcagtctgctggtccccctgcgaaggcccagggcttccttgtttgaaaagtcatccccttgtcgaggtctttgattccttttcaccacggcagtcatgccgagggtccacagagccaccccttccccatctcttcctcggcccctcaagacgcatctgtacccccggagatgtctctttgttttcttgggccacctctcctggccgtcactcaccctgctgactcattacttgtgcaacagtttcttctggaaccctcaggctcctgccacctaccctctgcagtccccgttttgttcctcttgcctcagtcttcctccccatcacccctctacctgttggtctccatctctgtctatggcacatccctgtgttatactctgatggctggataaaggttgagtgaaacgcatctacccctttggtgactggggtgcccattaatcagaagggatccaaggctggcgtagccttttcccgcatcctggggtatcgtcctgtggctcttccttgttggagtctgcagttttttgtttttttttttttaaattttttgagatggagtctcgctctgtcgcccaggctggagtgcagtggtgagatcccagctcactgcaacctccgcctcccgggttcaaccaattctcctgcttcagcctcccaagtagctgggactacaggcgcccgccaccatgcctggccaattttggtatttttagtagagacggggtttccctacattggccgggctggtctcgaactcttgacctcaggtgataggctcgcgtcggcctcccaaagtgctgagattacgggcatgagccaccaggcccggccgttgagattaccttcataagccaccaggcctggctgtagttggcagtttttgaccactggtctcgctccacgtgatctgtgatcttccccttggccccctggccctgccctgttcatctgctcacctttctcatgcatgcggtttgttcatagggtatgtaatggggtctaaccaggaaatggaaaccgcttgagcatttatttatttatttatttatttatttatttatttatttttcccaagacaaggtctcactctgtcacgcaagctgaagtgcagtggtgtgatcacagctcatggcagccttgaactcctgagctcaagcgatcctcccttctcagcctcccaagtagctcggactataggtgcacactatatgcctgcctaattttttcttttatttttgtagagacagggtcttgctttgttgcccaggctggtcctgaactcccaacctcaagcaatcctcctgcctcagcctcccaaagtactggagctacaggcatgtgccatcacgccttgctaatttttgtattttttgtgtgtgtgtaaagacaaggtcttactatgttgcccaggttggtcttgtactcctgggtttatgtgatcctcctgcctgggcctcccaaagtgctgggattacaggcgggagccacagtgcctggtccacttgagcatttagaacagaaggacttaaaggcggggaactagttacacagatgatgggagaggtgaaggccagacagggaacagagaggcaatcagcaggaaatcaaagtggtgtgggcttatacagccctctaaaggtatggatgcaatgattcatttagaatgagaaaataaataacagcaaattataaattataagcagctgttaaatatcacaaacatcactacatgcagaagagtaccagtcaactgtcagtcatatctccaaagttctatttctcccacatttttggcattacttcttcaatatgatgactttgtaatatcgttttctatttcgagaacagaaaactgatcaggctggacacagtggctcgtgcctgtaatcccagcactttgggaggccaaggcaggtggatcacttgaggccaggagttcaagaccggtccgggcagcgtggcgaaaccccgtctctactaaaaatacaaaaactagcagggcatggtggcatacacctgtagtcccagttacttaggaggctgaggtgggaggattgcttgagcccaggaggtcgaggctgcagtgagccgtgatcatgccactgcactccagcctgggtgagagagtgagaccatgtctcaaaaaaaaaaaaaaaacaacaaaaaaaaacataggctgggcgtggtggctcacgcctgtaattccagcactgtgggaggttgagatgggcggatcacttgaggtcaggagtttgaaaccagcctggtcaacatggtgaaaccccatctctaccaaaaacataaaaaattagccaggtgtgatgacgcacgcctgtaatcccagctacttgggaggctgaggcaggagaatggcttgaacccaggaggcagaggttgcagtgggccaagatcgtgccattgcactccagcctgggcaacagagtgagactccatctcaaaaataaataaataaataaagcgaatgaatctccttagttgatcaaattttgtttttatttttggtagttgggatgtatacaaaagtggcggtcaacatggagttggtggtgctgctacaattgttttgttcaagatacacaggaattctggtaaatcctgtttttttctttttttttaaatgtgattcccatcaagaaagaagtaggaaaatgggggagatttctaactgcatatgaggcatttgtgcatgtatttctgaccagagagacttttctgttttgactccacattgaaggaactgaatcctttgcttacaacttcacctctggtgatgggagtaattttccacagatttgcttctggacccgtgcatttcaaatcttgcttctctccactgcgcacgtttttccggcgccaggcaccgcaggatatgttcgtgtcttgtgatttttgattctgcgcggtaggtggaattggaacggtgagtggagcgagtattgctggaatccgtttccacaccgggatagcgagcagtaactgaactatacatggaaataaatgggaactacataaatataacccgaccaaagccaaactaaatatctttccagttcaacttctccttagcaggagcccccacgtggcagcaagcctccgtttccacctcacacaagagaaaatgtgacgggcaggaactcaagactggaaatgaacggggacgttaattgattgtagggaaaatattttccattttgtaaattttacaaaaaatgtttgaccctgtggacatgtggttagggcccttctcagtgccttgagagggaaccatgcaggtagagggagggttcttagcattgtgggggtgacctggagattggcagcagggtgccaccaccacccctaggtggggatgagagggaggaagtcctgtgaccagagtccaggggccagagtcacctgctgggagcccaaacaaaggtgggactctggcaggagctggaactacacagaggaccacctctcctgctggagaagctgtctgaggcagaggaggtggagagctcccgcgccctcccttgcttccacctcccaggttcctcccaagcctctcgttggttgaacccagcccaaagccagcaggcctggggacctggacacctgagccagcagaggtcggcgtttctcccacacaaaggagggcacaagaagtgggaggcacggagggggatcaggccaggacccacacaggatgtgcaaacaggagctcccctctcttcccaccccaaatggcatctgcagccggcctcacttccctgctgttagacaggaagaggaaccttgttcccggcaccagctgcccccaccgccccccaccccacggaggcccctttcctctctggcctttgcttgcaatcattggcgacgctgatggaccatatcttctggggagtttggtcatgaacatggtttcccatttgttgtggaccaaactgtgcccttccccttgaattcctgcgttgaagccctaactcccaatgcagctgtaattgaagatagggcttttagggaggtaattaaggttaaatgaagtcatagggcaggaccctaatctaataggattgatgtccttataagaagagggagagacaccagagatctctcctcccccctcacttgtaaacagaggaaaaatgacggaggacacagcagggaggtgggtacaagccaggaagaggggcctcgccgggaactaaccctgacggcaccttgatccgggactttgggcctctcaaactgagaaatacatgtctgttgtttaagtcactccctccacagtaatctggatggcagcctgagcttaccaaggcaccgtctgcatcagccagggctctccagggagacagccaataggagatggatggatggatggatggctagatagacagacaagcggacagagagagagagagacaggcagacacagacagacaggcagacaaatggctagatagacaagcagacagagagatagagacagacagacacaaacaggcaaacagacaggcagacaaatggatagatagatgatagatagccaggcaggcagatagacacagacaggcagacagacagacagacagatgataggttgggttcagtgactcttacctgtaataaccagcacattggtaggctgaggccggtggatcacttgaggccaggagtttgagaccagcctggctaacagggtgaaaccccatctctactaaaaatagaaaaattagctgggcgtggtggtgcatgtctgtaatcccagccactcgggaggctgaggcacgagaatcacttgaacctgggaggtggaggttgcagtgagctgagatcacgccactgcactccagcctaggcgacaaagtgagactccatctcaaaaagaaaaaaaagatagatagatgaatggatagatagctagatagatgacagatggatgataggtagatagataattgataaatagatataaatgaccgatggacaggcagacatagatacattgattaggtagatgatagatggatagatagaagatagatggtggatgggtgggtagataggcagatagacagttagaaagatagatgatagatagataggaaggaatttattaggggaattggctcataccattgtggaggccaagatgtaccacagaaggccgtccgcaagctggaggcccaggaaagccagtatcgtggctcagtccaagtctgcaggcctcaggactgggaagctgttgatgtaactcttagtttaaggccaaaggtttgagagcctggggaactgctggagaactgggagttctaagtccaagggcaggagaggaaggcatcccacctccaggagaaagagggaattcaccttttctctgcctttttgttgtctggcaatggaatggtgtcatccatattgagggaggatctttaccactcagcccaccaactcacatgcccatctcctccagaaacaccctcacagacacacccagaagcgatgcgttaccagccatcccttaatccagccaaactgacacctgccgtcagccaccacacaggctcagaagaatcgtggttgcatggtgatggtctccatcccgtctaaagaagttgaagatgaactgttggcacaagccatcgttctttcaggctccttccagtcgttcattcttttaaaaatgtattcattgagcacctgctgcatgccaggtgctgtgacaagcactggggcacagcagtgagcaaacaaggactcttgtttcttggagtttacatgcagtagaaggaaacagaatcaatgaattcatcagttctagaaactatcaaaataggactaagagctgtggtgagaattaagataaggtgattgcatagaaagtgactgatggctgctttggaatgagtggtgaggggtcacagagatgatgacagctgagttgagattgggaagacaggaaggagccagcagtgcaaggactaggctggaagcaagcttggtgcattccaggaacagcaaggaggccagaggggctgcagtagagcaggcgaggaggaggagggagacgcaggtcaaagaggagcctggggccagatggaggaccctccctccaaagctcagtcatttcctccttaaaggagaatgtgttacctccaaaagtcacatatgccagcacagtgtctggctcatcatatgccttcagtaggcggtgagcatggctgttcttgttattactacatcacaattactaggaataatggagtcaccaggctttgcatttacagcaatgtgagggagtcagcaagcttccctggggaacccatctcccctcactaagttcataagagcctgataaccaggtcaatgtagtgagagctatagctgcccagtgtactggactctttagccacgggccaggacactttcatctcagcagaaacctctaaggggactggggagtgtgctgtggatgtttctgggttactcagacctcctggggagccttccccaccgcagctgctgcagggagctcagctgcagtgatgaactgcggctcagccttgtttatgggaaaaccctacatgggagatgggacggtttcctgttggttctctcggcctcaggttgctttcacaagtgcagggattctcacctgggtgtgtgaatggggctcaggatgccccaagggtatgtggagatgggggtcagctgtcttctctgatgcctctgaacctcctccccctgcctttctgcatctcattgcttcctggcctctctcactttgggtgctttggaacaacatgcaatccaatacacaggctgactttattattttgttttgttttattttattttattttggaaacaaaggctctgtcattcagcctggagtgcagcggtgcaattgcaactcactgcagccttgaacttctgggctcaagtgattctctcgcctcagcctctcaaagtgctgggattacaggcatgagctgctgtgcctggcctaggctggctttaaaagctcctcactctctctgcatcctgatgatacctacctcctggagcaggctcccagccattggcttcggatactttgtagctattattggccagttgtggcatgtgaagctgaggctcaggagaagggcagtcctgtccaaggccacacggctcagtgctaacactcagacttcagtgtttttatctccctcctggtcgcttccacccttagtgcatctctggaggcccaagggagctaaaggccaggctttggtcagctaagaatttaaaaaagctgtctctgtgctcctctgtcaatccatcactccattatctcccccgacaatgaattcagtttgaatttcagataaacaaggattaatttttagtataagcatatcccacaacagacttgggatatacttatgcctaaaaatgattcattgtttgctggccttagtagctcatgcctacaatcccagtgctttgggaggctacagttggagaattgcttgagtccaggagttcaaggttacagtgagccatgatcatgccactgagctccagcttgggtgaagcagcaagatccttatctcttcaaaaaattgttgattgtttatctgaaatccaggtttaactgagcatcctgtattttatatgagaaccctatataggtgagacccagagtcccaatgcccactggtaagcctttgcagggaggctctgtgggtccttggctggcactgatgccctgtgatgagcagggccatctggcaaggtggacgcctgctgcccatgcaggcagagcaaggccctgggcaggtatgagctgatctcaccttccccagcctgggagccagatactgttggcagcttgccgtcaagagaggggctggtcaccaagagaggggcggcctccatgggccttctttggcttttggctctcccccagccctcctcctaccccaaacagaggccaacggcaccgcaccagaaccagtgtgctgcctcctttggttggcattttgtagttgggtagactgtttccttctcacaggagctggtggtgccccttccgcttcacagggaggatggctgagacccctgaccttgacacagggtgctgttctttttttgttttgagacagagtcttggtcttttcacccaggttggagtgcagtggcatgatgttggctcactgcagcctccacctcctgggttctagcaattcttctgcctcagcctcctgagtagctgagattacaggcgtgcaccaccactgagaacaatgccttctacagtgtttattctcctgtaggagcaagttcctaaggcaaggaggttgctcccctcatggatgaataaattgactttgatccacagccccacgtgtcagccttgagggtggggaaaggttgttctgtgtctaggcagggggtgggggcaaggccaggagggcctggtgcccagtgtacctcttcaggacacaactccaggtagcagaggccaaggacagaggggaggagaagagggaggtggccattatctccttatctcagcttcctttggagataagcttgagtattttagttgtccactaagtctggagataagtctggaatttaaacctttgactttgatccagcccttcacagctcctgtgagcaaactgagcctcagaaaaagggagtgaagcctgtgcatcctggacgcccccaccccaggctcaaaccgcccccaccccaggctcaaaccgcccccatcccagctcaaaccgcccccatcccaggctcaaagcgcccccatcccagctcaaagcgcccccatcccaggctcaaagtgcccccatcccaggctcaaagcgcccccaccccaggctcaaaccgcccccatcccagctcaaaccgcccccatcccagctcaaaccacccccaacacaggctcaaaccaccctcaacccaggctcaaagcacccccaccccaggctcaaagcatccccaccccaggctcaaagtgcccgcaacccaggcttaaagcgcccccaccccagctcaaaccgccctatcccaggctcaaaccgctcccaccccaggctcaaaccacccccatcctaggctcaaaccgcccccaccccaggctcaaagtgggaaggagccacagggaaacaaacgggggaggcacggatgaccaggatgagggtctccatgacccacctttccccaggggctatctcaagagctttttaaacttttattattttttaatagagatggggtcttgctgtgttgcccaggctgatctccaactcctagcctcaagccatcctcccacctcagcctcccaaactgctgaggttacaggtgtgagccactgcacctggcctctctcaggagtttcaagaaaaaaaatgggaatagatttgtgtgtgtgtgtgtgtgtgtgtgtgtgtgtgtgtgtgtgtgtgttttgagaaagagtttcgctctgtcacccaggctggagtgcaatggcacgatctcggctcactgcaacctccgcctctcgggctcaagtgcttcttctgcctcagcttcctgagtagctgggattacaaacatgcaggctgattttgtattttcattagagacggggtttcaccatgttggtcaggctgatctcgaactccggacctcagatgatttgcctgccttggcctctcaaagtgctgggattacaggcctgagccaccgtgcccggccaggaatagattcttttctgtagatgacttctgtcattattgaaaatggatgtttatgcacaattgaattgtcataacgcctcatcctaaaaagctcctttttgagaaaatgtgacttttgatagaggagagactgtccaggcctcattcattgtcagcacaaaggcagagcaggggtgtggcggtgtcaccctcctctgagacagccccatccctgctctgcccaggggttcagaagtctggtctattcgagcccacagaggggtttggagtggctgtcttacatcacaggtggggtctgtaaggatctgaaatgacctttgagaaggcgggtgtggtgggtgcatttcaatcattaaagtaacaacaatgatacatcaaatagtgtctgctcagattctgagtgcctgtttaaacatttccatcttgtgacttgccagattctagcataacaacccaggtaaaagaaaaaatagctgggcgtggtggcttgtgcctgtaatcccagcgtgaggccaaggcaggaggattgcttgagaccaggagtttgagaccagcctgggccacctgagaccccacctctgaaaataaacaaaccaataaaagaccttcatgctctatgtctttcttatatctaggttccccaaattatatgcattggggaaagtccattaagagaagcccctggccgggcgtggtggctcacgtctgtaatcccagcactttgggaggccaaggtgggaggatcacaaggtcaggagttcgagaccagcctggccaacatggtgaaaccccatctctactaaaaatacaaaaattagccgggcgtggtagtgcatgcttgtaatcccagctacgcaggaggttgaggcaggagaatcacttgaacctgggaggtagaggttgcagtgagccaagttggtgccactgcactccagcctgggcgacagaaaaagactccatctctaaataaataaataaagggagagaagcctctgggctcctagatacatgggtcagtgtccacccctgcaaagctgctgtgcccaaagaggggctgtacttggtggaattggggcaaaagagcagggagggcactgggcagttgacctggtctccactactggaaaggggctgtgctgctggtgccctgagctggttccacaaggaagacactgcacagggcgccctaagtttgctctttctgcctaggctcaccctttcctctccaggaccagggagccccgctcgtctcctgtcttcggcatctgctctctggcttgtgagcactgcatttctttctgcttggaacgccggcccatggtgggtccccggactcctgccttctgctgtcttttgccatatctcgtcaaagtgtgttttatttatttattgttattattttttgaaacagagtcttgctctgtcgcccaggctggagtgcaatggtgtgatctcggctcactgcaacctccgtctcctgggttcaagcgattctcctgccttggcctcccgagtagctgggattacaggcgaatgccaccacgcccggctaatttttgtatttttagtagagatggggtttccctatgttggtcaggctggtctcgaactgacctcgggtgactggcccacgtcagcctcccaaattgctgggattacaggcgtgagtcaccatgcctggccaactattataatattgatattataataatatcacagccagataacggtgactaacgcctgtaatccgaacactttgggaggctgaggcaggcagatcacctgaggtcagttcgagaccagcctggccaacgtggtgaaaccctgtctctaccgaatatacaaaaattagccggagcgtgatggcaggtgcctgtaatctcagctacttgggaggcggaggttgcggtgaactgagatcgtgccactgcagtccaacctgggtgacagagcaagactccatctcaaaagtagtaataataataataataataataatatcacttattgagttttaattttgtgccaggcactgtgctagtacttgcgccatgtgacctcattgactcggaacaacctatgagtaagcaccatctctgtccccaaggaagctgagactcaggaaatggaagtcatctcccagggcccacagcaagggcctggcgaggtctgcgttcaaattctgatcatctgactccaggctttcctgcctcctttgcctcccaaaaactcaaatactttcatctgggatgactccagacagctagatttcaattgtcttctctccttctgagtatgttttattttaaaatcacataaagataactcacttctcaactggagccacggaatcgttagatgtcttggagacttttctagctacctctttgctggactcagacacaggcctgaataattaggtccaaggagctgaactggagccgctcgtggccagaggtcccttcctgggaacagcagtggcggcagcggctgcgctgagcctggcaatttgttcaagagcaggggatgctcaggctgcgctcgcccccttcttatgaacggtttgctttgcgtcttctctgtgccaagggctgccaggcaccagatgcccattttaggaaatcagaaaaataaacagtgtaaataaaacaaaaactccacccaagaaatctgagacagatgctgttttccccaccgtttctccacccccatgctgggtttggagagagtgggccagcatgtttcctacggataagaggccctggggtatttaacctggatggaacctcttctattttccttttgcctggtgctagggggcagaaggcaggggtggtgtccatctggcccagggaggaggatagggcagcctttgtcgccggcatcccctgcagagatgtctcagccagaagtgactccatcctcaggaacgtgtgtcctgttctttgctgggcggcccctccttaccccccattgtttccacagtggggtgtgctagatttatgggcagagttctggttcactctcagccccggacagcagaatgtcccagtagtgcactgatggtgtgtgcgtggggatgtgtggaacaggggatagtgaccccgtgtgcgttatatgcagtgcggcttccagtcgggtgtgtgaagggggtgctcatggccatcgtggaagtgagctcagctggggctggagggtccaggctcactgtatgccactcagcagccttgggagtggggttcatcctcctccccgctcctctcccctcctggtcctgggcagcccaccggagctgcactctgggccatctctcctggtcttaaggaggctgtcatttctgggaggcagatgctggcccttccatccttgcttcctggagatctgcgccgaggtctgcctttctgtctggagggactggccaggaacccctgggttttcctggtggggtttttgttgcttagcagtgagcagagtgagtgggcaccaagaggaggatgctgggtgaggtcacggacatggctggggcaggctgggggtgctggaggtgaattccgcagctgtgcgaccttgggcagtttgcccagccctgggcctcgcttcctcctctatgaaatggggcgggagcacctgcctgctggggttgtgggttgggtgaatcggagctaaggtacagctcacagcctgccgtcagaccctcgcaagcagaagtgggtgtccctgctcagcgtcctccggtccctccttcaaggctcagctttgtcctcatctcctccatgaagcctccctggttactccaggagtcacgacccacaccctctttggagccttgtgtcacacgcatttctcacggtgttgctttccctggaggatgggttcaactaaaattggggcccatctgggggttccctccagcaccagagaagctcaggcttagtagagatgggtaccctgtcaatactagttccgcgaaggatacactgtgctcattctgctgccagttgctgagtctggtgtcctgtagttatggaacatgtgtacaggcctgggctgctggacacgaaggccagatgggcagttcactctgcctccgctctgagcctttagaaacaagctggctgcacccatttccatctggtcacagtttaggagtggggttgtggaatggatggaaggaaggatgagtgggtgggtgggggggtgggtgggtgggtggatggatggatggatgatgggtggatgggttgatggatgggtggattaggtggacaggtgaatggattggtgggtgggtgggtgggtgaagggctgaataggtgggttgggtggatgggtggatggatgtgtggaggggtggtggggtggatggggtccatgggtgaatggatggatggatgggtgaatggagtaaatgagtgggtggatggatggatggatgctgcaagagcctttctggagggttccagggaggaactggcatctttgaccagcagccagcatggtgatcagatacagggaggtgtctgggtctgcctgatcccttatctcactgttggtgggactgggctggttatgtgtccctgaagctctctgaagggtggctgtatggcattgcccaggggacatccccagagtgccgtgctctacagcaatagggtggccgcctgtgctcccagggccgctcctcctggcagcctttcgggtttgcttggcttagcacctcagcaaatctcctcgagttaggacttgcctgccatgagcctctccaacaagcagccccaggccaaggcctgtgtgtgggcagagggagcgcatgccgcgggaggctgcattaatctgaggttctgtttttgttccctcctggggcaaaaggtaaaaatagcctgtcccactccatccccaaatccagcccggctgcacccagccctgggagtgaagggggctgggtcaggactgcccgtgagttgtagaccctggtgtagggaaaccctgattcataagacgggtggacatggaggaaggaggagactccgtccagcagagacacgcttgggtgcagcccagcttggagtctgatggacgtgggctcacctgtgtgcaactctcattcactgtgtggccacagggaagtgacactctgtggagactcagattccttatctgcaaaacaggggtagtagggcttgggggaggatgtgtgtgaaggtttggcccagggcccctccagcagccagacagcagtggctgtcatccctccagcgtccagggttacctgggggagtagggcctctgtccccagatgggccccgtttctggctctggaactcacagcaggagcaaaggcgaggacattcctggtgttaatcatccacccggagggagagcgccagtggccttgtgtgacctttgccctttgtctctgtctttaggaggcacgcggacctccagtggccggctccggaggcttggtgactccagtggcccaggtaggtggctcgctccgctctggccccacccagctcatgggtgtgtttgtgctggggtcccttcattctggtctgggacctgcctccccacctggcttccctggatgagtggggccacttgcccatttcccagggagacgcagtctttgacggctttggactcaggtggcttccaggcctgtcgacgctgccctgctggagatgatccttgtgggggcaggggcagccacccccaggctcagggagcaagcccgtgtgtgcgggacagaggagagaacaggagatagatagggctggatgatttggtttgagatgctgaggggacagatgtgccatggacaggtggctttggccgtgagcctctcggtgttggttcagtatctgtgggctccctgcaaccttgcaggatggaagatgctccaggatagagcagatacgtccggtgttatctaggaggaaataagtgggcctctggcagtggtcactgtgctactccttgtgctttttccatgtgtttggaaattttccacactaaccagtagggaagggaaacagatgcacccatcagagctctggggctggccgtccaggacacgagttacagcttataggcttgaagggactctaccaacactgggtgcagcctgggcaagggagtgggacagagaggtcagggctctgcctccagcccttgccccccagggctgagtctgcgcgtcatcttctccccactgggtgtccctgatctcccctgcctgaccccagtgtggccatgctagtgcctctgtttctgggagcctacgttgttcttggctgtcacttccagcggccaggctgggacaggtgcccatctagtggcttttctatttggagaggatgatgggtcacagcaatgaatggacttacctcccctaggagacgaggagctctgagaagagcagagatggcgtggtcacctgtgcatatgtgctgggggccaactgggtgccagacccctggctgccatcatggtggcagacaggcagggactgtgccttcatgaattagccattctagaggagacaaagttaccaaaggacacggacccggagtcaaatccacacaaatagagcgcctgtggaccagggctgccttcagaacaaggtgagacagccgtcctgccaggacaaggcgcctacgggggcaagggcatgtgcccatctggagccgccacctccatgctctagaccagctccgtctaatagaaccttctgtgatggtgggtctgttctatacatctgcactccgccatcctgtatggtagccgcttagccgcctgggtctattgcacactcaaagtataaatgtttacgtttactttattcactcatttacttgcatagaattatttatttattttaaatggatttccacttatatctacgtgtggctagtggctatgaaactgaacagttccagaccacactggcacctgagacctcagaattctagacccaaagcctgcttctgatcctgagcttgcttctgtggggacagcacagacgcctcctaagtctgccttccagaggtggatgcagtgcccgtggactgtgcaccaccaggcctggacagtggagagggtggctttttacagggagtgggagtggaggggatgccgtgtccacattgagtgcatgtgaggccccttgcagtacaggatgggactgtatgtgggaagaggggggtgatgctctggctggaggcccctgggcagctgcatgattcagcgctgtggttaagaggggctccgcccatcgcagtcatgttgggcactaaccactggacagcccagccgctgctgtgtttctggggagcttttctccggctccgcatctgatctgcctctccatctccttccctctcattggccagcttctggtggaatgggtggggagggtcccccagttcttgtgggggttgcatcttgggaacctggcaccctgggctgcatggacacagcctcccccggcggttgcttccctctgctcagactggctggttctgtgctgtcagcacttggcagccacgatcacagctcagcttggaagcctaaggcataatttgctgaatcccaaagctgcaagctggtgatctgggtttgcgtgggactgcctgctgacacacggggtcctccctctgtgggcctctgtgggctctggcccgagacaccctttcctcatcttcttggcttctttctttctccctgcctcccttttgctaagaccctggtccaggcaggagttcattcctagacgccccagcatctccggcctccccatttgacactccccagacgactgtctgccatcccatcctcccagcccagcttctctgtagatccacatctggccaatctcctatgtctgggactcttgccctccccagaaggacgaaggctcttctcgaggttgtgtttgggactgggccagggatgacatttctggcaaaagcttaaatgacaccatgatcaacgctttggtcagctcacacactttctttccttttaaaaaaaaaatggaattcttagagctacaaaacaaaaatgtaaagaataaggtaataaaacacctgtgtactcaccatcccgcttaagaagtgagacattgcaggtgtagccgcagccctgggtgaccttctccatcctagccccactcctgctgcggtgcccgcccctctggattgggatctggccccgggcaggcacatctgtgctgggcagtggtgtgtctgagaagcctaggtctccttttttttttttttgagatagagtctcgctctatcgcccaggctggagtgcagtggcaccatctcggctcactgcaacctctgcctcctgggttcaagcgattcttctgcctcagcctcctcagtagccaggattacaggcacccgccaccatgtctggctaattttttttgtatttttagtagacacagggtttcaccatgttggtcaggctggtctcatacccctgacctcaggtgatccacctgccttggcctcccaaagtgctgggattataggtgtgagccaccgcatccggcctggtctcctcttgcatacggtcatcagcatcgtgtgactgagcagcctaggtctgtctcctcttgaatgccgtcatcagcatcacatccttggtgcctcactggagtcagtggctgccctgcctgtgcccacaacgtgacggcgtggagacttatccgtgtagatccacgaagccttggttcacttattttggcagctagcgagtgttcctctgtgtggggaggcagagtttgcccgtcccgtggcccactggtgacatcgccgaaggtcttctctgttactagtgctgccgggaacgtgtgtttccccaggtggatttggctgggctgtggagatgcgcttctcagcccttctagatgttaccaccacgccctcccgagtggccttctggtaggctctcccatgttcgctcattttctgtgcctcaggcagccgcctctctgactgagcgtccagcggacttttgccctgtttcccacggtgcacggagcatttcatctcagtggtgcctgagcttccctccctctggccctcagaccccggctgggatccttggagccaactcctctgcctgacatcccgtgtcgctaggtcctgctcttccatcttccaatacctctggggtgtgtggccttttccccagtgcccccatcatcccttctgtcctaggttgaaccgtgtcccccacaaactcatgtccaccaaaaacctcagaatgtgacctgggagttggagatggggtctttgcagatgtaagtagttaaggatcttgagatgaggtcattctggattagggtgggccctaaatccaacaactggtgtccttaaaagaagcagagaggccacagacacaccggggagagccacgtgaaggcaggagcagatgatggagtgacgcagccccaggccagggagcgtctgggaagaggcaaggaaggaccccccccccaccccaccccagagcctccctagggagtgtggccttgctgacaccttgattttggacctctggcctccagcatgggagagaacccgcttccattttttcaagccccacagctgtggtccattatggcagccacaggacactgatgcacctcccacctggccgctgtggatggacgaccccgcccgcaggaagtctccctcaagcactgcaggtgtctctgccctcacaggggacgcctgcacaagtaggtgtgaaaaaagggccctgtgggggcaaggcctgggctggtgctcgctgcctcccttcatcctatgctagttcccatgcctcttccggcaggagtgcctggctccacctggtgaatcagagccaaactctcctgacaattggctgtcacttatttaactgccaccatccccaggagacagaaaatgccagaagggtggggcctgtgcagtgcctcctcgctatttccccagggcaccgtgccacgttgcctcaatgcacagagtagctgctcaaagtgtgtcggacgaacaggtgccccatgcccagccatgcagacaaaagtgtgccacgtggagggagctggtcgtggaagagaccaccagcatcttggctgcccgaggaccttgcccctgggctcttgcaggcacccctagttcattacttcctctctcacccatagctacccactcttcctctatttctctgatatcagccttgccacccacccaggtttgcaagcaggaaatctcagagttgaccttgacctctgcctccccagcacccccaggtctcaacaggctgccaagatctcatcaactcgccctctgcatactgacccttggacaggctgccccggtcacggtcatgtcttggttgggcctccatcatccctccttggaccagcaggtgccatcctccccacccctgccctgctgtggctccttcccctccacggccaacatttagaggacgattaccacttccctccctgtgtgctggggaccgggtgataggatccctccacccgatcatttccattagacctgggccgggtcttcttactcatagagcccttagtttccgcccccaaagcctcgagggtggattcgtgctgccgcccagcctggccctgataccgctttccagcctggagccccctgcttctgcgctcctggctctgagtgctcgggccccccctggatgggttgccacttgtcctctggaaagcagggcttccatgctcctggacctcctagctgactcagtgactttgggccatcttgtcacaccccttctatcagcttggccttggttatttctgtgtcctccatagcctcggaccagagccacggcgggatgctttcctggtgcgtggcaggcagtcaggaaatattgctggactgaccttgataggagatgcttgggagaattgcccaaaaaactagcttaaaatgcaaatattggccttcttttgcgttggctaaagagtagcatttctccgtttgcctcccgggtaagaaattgatggcgaatgcaatgtctctagggaggagaagaaggtgacaaaaagggtctgtataacggggcacacgctaggcatttgtgactatttaagtttaaattataacataaatgcgaaactctttgccttggtagcccttccacattgcaagcgttcactgccacatgtggctgccatattgactacggcagatacagaacattgacatcattgcggagagttctatgggggggcgctggtttagatcatcttcacgttggatccacaaattcattgtttatccagtgaacggttactgggcacctactgagcaagcaggatgaaagacacccgctctcgggggagtcttccgttggctgcagagaagcttaaactcaggggacctggggcaaactctgcaagggcccttggcctctgcacccccagacctccctcgctctgcaggggcagtcgggggccccctctaggaatggagcgccagctccagctcctgtcaggctacagcccagatggttggctgagcacgagcatgtgagagtggaattgggcccaaccgggctgcttctccccgttgtcttggtttccttccacgctgacctggaaggactcctaaagcaacaggcctgcccaggcggtttgcaccagtaaaccctgcagcggccccaagggcagagatagctggattgtatttatttaggaacagccaaagtctgaggcacaataaaaagtggagaaagattccagagaggaatgcagctggcctcagcctgggaatccgtcttgcttgggaggctgtaggcgggccaggctggggccagcctggagggtcttggctggctctgctggcaggtacagtagcagggtcagcaggagggagtccaggacggagctccttcatttttaattcagggaagcaaacttcagtggttgagtctgaggatgagcaggaaatgaatggaaaagtcttttttttttcttttttctttctaggcagggtctttctctgtcccccaggctggagtgcagtggcacaattatagctcactgcagcctcaacctgccaggctcaagggatcctcctgccttagcctcctaagtagctgggactacagttgtgcgccaccatgactggctaattcttaaaagaaatgttttcaggctaggcatggtgacccatgcctgtaatcccagtacttttggagccgaggtgggaggatcacttgagctcaggtgctccagaccagcctgggcaacatgacgagaccccgtcttgactaaaaatacaaaaagttagctgggcgtggtggtacagccctgtagttccagctacccgggaagctgaggctgcagtgagttgtgatcacgtcactgtcctccagcctgggcaaagggagtaaggccctgtttcaaaaaaaaaaattttttttttttttgaggtggagtcttgctctgttgcccaggctggagtgcagtggcatgatcttggctcactgcaatctctgcctcccaggttcaagtgattctcctgcctcagcctcccaagtagctgggattacaggcatgagccactgtgcctggactttttttttttttttttttttttgtagagatgggatttctctatgttgcccaggctggtcttgaactcttggcctcaagtgatcctcccactttggcctcccaaagtgttggaattacaggtgtgagccaccacacccagcaggaaaagtcactttttaaagcgagaggttgtgcgtcctctatagcttggcgctcatcagcatggaggatttactggaacgtgtgttaggtgaggggacatggaagatggcagcaaatccgagcccagagcatcagaaagcatgctttcagccaaagatgcgttctctccacctccgcgcagcacccttccccagtgtgtactcctggagcaaggtggggccgatcctacgaagaccctttcccgaaggcccctgctgcccacatcagtgtcacctggaccgcctgctcccttttctggatggctggaccagccccagggcctcctggcctggtgtggggagcacagtccaccctggggaatgcctggtatgtgtcccctccccactgggtaccaggggatgaagctgtgcttcgtggaaggggacagaggcgctggtgcccaggatggtgcacctggggcggctgaactggacctggctcctactgggcccctgtggagcccagattgttgtgagaaggggtggggaaaggcaggtgatccgcacctttcacttttgtttcacatgggaacaggggcttatcctgcacacatattcagtttggagtatgaatttccatgaagaggaaaatctctattaggctctgatgtcaggattgtccgtgagggccgggccgtgttctggggcaaggacaggagtggagggggcaaccagggaaggcttcctaatggaggaggcatttgatagcatcttgaaaaagaagcagttcctaggccaagccagagactgaagaatgaccacctaacttcttttttttttttttgagatggaatctcgcgctgtcgcccaggctggagtgcagtggcgtgatctaggctcactgcaacctccacctcccaggttcaagcaattctcctgcctcagccttctgaatagctgggattacaggcatgcgccaccatgcccagctaatttttgtatttttagtagagacggggtttcaccatgttggtcaggctggtctggaacccctgaccttgtgatccacctgcctcggcctcccaaagtgctgggattacaggcatgagccactgcacccggccacgaccacctaacttctttctacaagatgccccctggctgacgcaaagcaggttgagtgagtgtgacacttccttcctgtctgtgggttccggcctttccagagcccggccagtgctattggagacaaagtggccttcgctcttccttcccgccctgccaggcccagcctgtgccgctgagccccactttgcaattaagaggagctgtgaaccagtgatgctgatgtcgcagaaaagtggccaggggtctatggggggtgaaggacagggatgccgccctgagaactgtctggaaggggcttttgggtaacagtgcccactccagggtgtgggcaggctggggtggctgggagctgggctcataggctggcacaaccagagtttcccaaagccgtgggcctgagggccctgccttcctgggacagcaacctttggtccaatttgggaaaaggtgggttaaaccaagcccggctccctcactgtaggattactcagtgcgtttagtatgcaaatgtgcctctgaatctaagacaggaccacagaaacctcttcagtgttcctctggagggagggaccgcgggggatccaccgcaggggcctgggtctgcactggcctggtgaagtgcccccttagtgcttacaccatgcgcggtgagaggttggccctcgcctcccccaccctctgctggccttacctcaccacctctgcactcgcctcccagccggctcatgactaactcctgcctcttcagagccaatcggtgctgccaggttttccatttcaagtgatcccccgcctgggccaaaatgtttggattttcaggcacggaggggagatggacctcaggccaaaccatgctgggtaaaactgagggtcaaggctgtgctcagcaagtgctccagccctggccgtcaaacccatagtgtgcacagcgtgcaggaggtggctgggtgaatgaactcagtcatagcccggcccctcactcggggctgttcccaagttcccaccgccagccaggctgggtcagagcctcgtggggccttcctgggcttccctgccccacagcaggagttcgtatggagagtctcgagtgaggttaatgggttttcttcctcttctttttttttttttttaatttgagacagggtctcactctttttacccagccagggtgcagtagtgcaattatagctcacagcagcctcgaactcctggcttcaagcaatccttccgccgcagcctcccaaagtgctgagattacaggcacgtgccaccttgcccagctggggtttctgctttttactttttctcttgtttctaaactcaatacaaagaaagatattacatttataatcagaaaaaccaacaaggaatattatttcaaaattggaaaagggattaaagaaacaaaccaagaaacctctgcgattcctgcccatcggagtcagtggttgttagtggttggcttaacacaatgttttaggaagaaatagaataacagaaagcaactccagtgagctgagccctggctccgtctgtggcgctgcatcagtttcctgcagctgctgtaacgagtggccacaagctggctgggtcacaacaacgcccagccatcctctcacagctctgcaggccacacatccgagatcagggtcaccaggctgaaatcagggtgtccactgggcatagccctctggaggctctagggcaggggttcccagccccgtgtgtcctattaggaactggcctgcacagcaggaggtgagtgactggcaagcgagcgaagcttcatctgtatttacagtcactccccattgctcgcattactgcccaagctctgcctcctgtctgatcagccatggcattggattcttataggagagtgaaccgtattgtgaacggcacatgtgagggatctaggttgcgtgcttcttatgagaatctgatgcctgatgatctgtcaccgtctcccatcaccaccagatgggaccgtctggttgcaggaaaataagctcagggctccaactgattctacattatggtgagttgtataattatctcattatatattataataataatagaaataaagtgcacaatcaatacaacgtgcttgtggccgggtgcagtggctcacacctgtaatcccagagtgaaactctgtctcaaaaaataaaaaataaaggccaggcacagtggcttatgcctgtaatcccagcactttgggaggccaaggctggcggatcacgaggtcaggagttcaagatcagcctggccaatatggtgaaaccccgtttctactaaaaatacaaaaattagccggacacggtggcaggcgtctgtagtcccagcttcttgggaggctgaggcagaagaattgcttgaacccaggtggcggaggttgcagtgaactgagatagtgccactgtactccagcctgggtggcagagcgagactctgtctcaataaaataaaataaaataaaataataaatataatacacttgaatcatctcaaaaccatctccccactccctggtctgtggaaaaattgtcttccctgaaaccgatcccaggtgccaaaaaggttgggggccactgccttcatcgcctgcccctttgagcctctggtggctgtgggtgtcccttggcttgtggctgcatggcccttaccttcaacaccagcatctacagatctctccgggccccatctccacttggccatccctgtctgtgtcaaatctccctctgcccccgtcttgtatgagcaccgagactgcctttagggaccacctagaccatccagggtgctctcgccacagcaagatctgcaactgaatcacagatgcaaaaactcttgttccaaacaaggtcccatttgcaggtctagggattaggacatgctatccctggggccattattcagccttctctcgtgactatgatccctcccttcctccccagcctcccacctcggctgagatgctgtccccacctccctcactgtctggctgcctgtggggctgtcctccaggctctttgggaggaggtggttgcttgatgtctcccagaaggctgggaatggtcctccccaccccccaggaagatgtcctttctgccaaggagattgcatttggggtcctatcccaggcagagagcggacgggactgtggcctgaagtggcacttcagggcctttggctctgtcatctagccgagggctgtgcatgggcctcacctggtcacaggtaactcacctggctctgtggggcagggattgtaaactcagaggcctgcggggtgtgtcgaggtagaggggtgcaaatattgtaaatttgttgggggccttggggagcagcacagactgaaaagtgttttgtctgaagagcagaactgtcttataccagccctgtgcggccaggcaggaaggcttccgtggtgcggccacgcgtcctccctttctcaacagaagctgacagtctggagttttcagagagattgcctgagttctcagccttggcacaaacacacattctctttaaacaggcttgggccaacagaaccagcctccgtgtctcgggtttgaatgaacccttgaggtgaagcttaaagacagagaggatgcccctgattcccaccccagggacccacattgtaaacccccacctgctctgctgagcccttggcctcagcatggaccctgaccatgtgctggtggggaccccccaggtaagtaagcagcctctgaggaccccggatgaacagtggggaacagcactgatcccccagtggggccccgagttcccggagaggaagactcgctccctcccaggggacggctagagactcactgactcatgcgtgtgtggtaggaatcttccaggaagtccccgtcccgttcgccctctctgcctgggcggggacggcaactgcctctgtcactgcagactaatgggacggaggggggtgacttctcagggttcctcctgggcaggtgctccggaaccttttctcagcacgctggcctggggcacggccgttcctcctgcccagccacgttggggtacagggtgaagaagggctggggccagcccaggacagaggaaggcgaggcaggcacgcaggaactgggctttttaaacccttaagcccaaggaaatcgtagcatcgcgggacagggaaaatgaaagactttggaagtcgtcaggaatttgactctgtgagttggtttccaagagtctaagttaagcatctccaagtggatattaaaaaggagcagcaagcctcggggcggcgggggctggaggaggtggagagaggaggctgccggaagccgcactcgggacctctgcagccaccgaccagaccgggcggccgggactctgggactctcgcaggcagacccggtggtctgccggactcctcggggcccacttcgggccctctctcctgcctcctatttttggatttctctcctttgctccctttttcctcccgttttgaagagacaatgctacttcagtttggagcacaaacatatgatcagcacatggaaatgtggtaattcggatgcattcgtgattgcaacagattgaagaaattagaccagacaaagagtgtttttagaggaggaggaggaggaggaggaggctgagagagggagggcgacgggggtgagaaaggggaggccgcctctgagcgggacgccgggactcccgccgctgctaaatatatccgtaggaatggagagggaccggatctcaggtacgcagacagccccctccccatcggccgccccccactgccctggactcggggctttatttatgcctgggggaataagcatgcaaagggcgcttttgctcatttttcacagaaatatttcttttctttttgacggttccaagctcgtgggatgaactccgtctcagaagctaagctctcctgagtctggcttttatttaaactcggctctcctctctcctggctacttccctttcattttccagtgtgccattcttgcatgtcatggccactgtcaatgctgaggctgttggcgccgaaaccttgggagggtgtgggggacctgcccccctggctcgggtctggggcggcggcgcttggacctggctggtggttggtttgtccactgtgtggtttgttttttgcttccagccaaagtctgtcttcaaggctgcctcggtctcctacctaaaatagcatttctgtgccttcctggcagttgattatagagggggaagctcccggcgctcagaggagcctggcgtgtgtgtgcacgtgtgtgtgcatgtgtgtgcgtgtgtccattcacgctggcagcccccttgccgcaggcacagacccatcagggcgtgaacaggcaaatgaagagaaagggggctcccctgcctttagttcaccccagctttccaggccctccctcccaggcccagcctccttggtcccttcactcacatgcggtgccgtggctgccatctcacgtggccagcgccgtcatcggtaattagcagtgatgacagtttctgccgctcatgccgccctctgagcccagcgctgggagacatggggtggctgagccaagctccaggctttgggtattctgaagtgacctacgggccatggagcgggaggtcgctaagagtgtcaacccctacgtgccttgggccctggtctgttggttgccactatgtgtgtgttggggggtccctgagaggcctgagagagggaggcccatctcggtggctcctctctaggacgtgtggtcccctccaccactgctcccagggccacatctttttttttttttttctttgagacggagtctggctctgttgcccaggctggagtgcagtggcgcgatctcagctcactgcaagctccgcctccctagttcatgccattctcctgcctcagcctcccaagcagctgggactataggcgcccgccatatttttttgtatttttagtagagatggggtttcaccgtgtcaaccaggatggtctcgatctcctgatctcgtgatccgcccgcctcagcctcccaaagtgctgggattacaggcgtgagccacggcgcccggcctcagggccacatcttgattgtcacgttgggactggtggagcgggtgtgtgttgtgccgctgagcacacccagtcgggcacagcaggcggacctcaggagggggccaggggagacggcagaaggcttgggtggcagtgaaactgcatcttatctgtttgagctcgggggctcaggcccgctgggacgggtgggtgtggagcccagcgtcctgctctccgcccagcaggagccgcagggcagggagcgctgagagggaccttcgtcaggcttgcacagtggagccgtcctcggagtgaccaccccaccaggcagcctgggcagaccacagtgggtcccctgcctcctgggccaccagccccaggaggacgtcactccacccgcctggctggcaggggcctcggggagcctcgggttcggccttcactttatagatgatctagccgaggcccagatgggtgaccagcaggggatctgagagctgagcagagaggcgtgggtttgggggtggtgctccctggggagctggaagtgatggcaccctcccaggctcacaaaacacgggcttttcatgaactgaacaaaacactctttgaaagcagccagtgctgtgccccagagaccactctgatccctgctgcccttggctgaggacagcacagccagggatgaagcggggacctcccctcgggctgtgccttgatgaaagatgctttctacaaaatcccattcggatgtgttttcatgtaagaaaacgtacatttttagaaactcagttgtaaactggctgccttccgaatgaacacgacagtcccggagctgtttcccttaatgaggttctcgtcctgggcaaactttagcgctggtctttaattgtcactgaactcccgcacagtccctggggaagtgacttccttcctgtccctgctgggtggccttgagcaagccacttggcagctctgggccgcagttccgtcatctgcaaggtgaggggtgggagcggcacggcccctaggcagcgcccccacctcctgcgggtttctgcgcgtgtcctgagttttgtgggcgcctcttccctcactgaggggctcttcttctctgcagggcatggctcacgccgcgttgtcaggctgcaagccactgcgagagctgctctgatccccaagcatgctctggcctgaggaggagccatggggaggacgctgtgcctgtgtgacagaggcctgcccggcagatgccggcccgctgacttccagacgtggctgtgggtgcctcatgccccactgggctggcgtgtgaggcgtgtccagctcaggctgccctacagctgcccaggaagggtttgtgggagggggtggtcctaccctggtgagtccacggtggtctgccagccccagggaaggcttaggagccccaagacctgccctcttgtccctccctcggcagtgtctggctccggtctggtttgtgaacgggggcctgggtactctcccgccctccctgggggctgtggccttcccctgggaaggtgctggagggtttgtcagcagggccggcatgagtcatggagtggtgactggccgctgaggcatggaaggccactccttccagccaagggtcggagctttttttttgttctggaacggctttgtggcttttacaaattaagcagttttatcttgttccaagagcttgtatttcagcagggagagagtctccaagaagggaactttccactggggagctctgttgggctgggaggctaggaacaggccacgagggagggctgcaggcaggggaagtggccgtctgtgcatggtcatgaatgcaggcccggggtcctggagggggcttggccacgctgtcgctggacgtctgtccccaccagggtccatctgatgcagtacggcacagggtaaagcccagctcctcttacggggttcctgggtcatcagtgggcggggaaccgaggcctcctggagggcggtgcctcagccctcacccctccctcctgtccctcgctgtgctgtccccgatggcctctgccatcccctgggagttcttacccctggacgctcggtgcctgtccggtctcaacctctccagctctgcttttccatctccgaggtgagaggcctggcctgacgcgctctgcacccgcttcctgcccagccccgtgggaactctggtccctgtagtggtttcctggggctgccatcaccaagtgccacaaactgggtggctcaaaacaccagacatttcttctctcgccgttctggaggccagaagtccgaaatcacggcatcagcaggcctggttctttccggaggctccgagggggagcctgcttctcgcctctggcagcttctggcggctcccgaaacccttggcgttccttggctcgtggccacaccactcgacctctgcctccgttgtcacggggcctccttctgtgccctaaatctccccctgtctgtctctcatacggacagtctttctcggatttagggcccactgggtaacccaaaatggtcccatctcaagatccttaacttcataacgtctgcaaagaccctttttccaaataggccatgttcataggctctggggtggatgtaaattttaggggccacctttcatccccctgttgtccccgtgtgtctggatgcacagcatggttccatgtcccagactccttgctggacccctctggccctttggggtggcctttggccttttccactcgtttctgtgctcctggtgaggtgtcggggtcgggcttagcccctgcaggaattctggggacagcatggagccggcaactccccaccaggcgtcttcctacctgcccagagctcatggttgtgaggggtctctccttgtggttttgatttgcaattccccagtggttagtgatgttgagcatcttttcgtgtttattgctcatttgcacatattcttgcagaaatgtctgtccaagtcctttacctgtgtttgatttggatgattgttgttgctgagtgttaggagatctgtagattaatatccagatactaatcccatatctgacctatgatttgctgccattccatggattgccttctccccacgttgttagtgccctttgatatgcaatttttttttttttttttgagatggagtctgactctgttgcccaggctggagtgcagtggcatgatcttggctcactgcaacctccgcctccctggttccagcgattttcctgcctcagcctcctgagtagttgggattacaggcacccgccaccacacccagctaatttttgtatttttagtagagacggggtttcactgtgttgactaagttggtctcgaactcctgacctcaagtaatccacccgtctcggcctcccaaagtgccggagttacaggcgtgagtcaccgcacccaggctgatatgcaaatattttaaacttctatgacgttccactttatctatttgttcttctgttgcctgtgcttttggcgccatatccaagaaatcattgccaaatgcaacgtcaggaagcttttcccctgtgttttcttctaagagttttgtggttttagctcttgagtttaggtctttgatgcaagttgagttgatttttgcatgtggtgtaagggctggtccagcctcatgctctgggctcttgattcacttctcttcttttctcacgcccagctggttccgctgggtggcggggaggagtggggaagtcccgggctgggcctgcactcgatcatcccctctcaggccagccagggagtctcagctcctgcccaggacctggctggacgtgctccctaccgggaaagcctgggccgtctttctaggctgatggcagggccagcccggggcgtcctgaggcctgccctgcggacatgccccttgttctaggtggtgtggctgcccggcctgcgtgtgagaccagctgtctgtgcttcaggccatggaggctgagtgtttccagcctgtccccttgctcggctctccctctggggaagcccctgcagcccattctctgcctccgcttctgccatctgtgcctttgtctgcttcctgtttggaggtggtcatccctggggccacccctcatgatctggacacaagtctccatcctgaagccaccacccaaacccctgtgcctcaaacccctcccacccaccacatgggtttccactgtgaccaactcagcagctgatgaagcttcccttggggctctcctagcaacggggagctggctttcccggaggcctggcctctccctaagtggaagtggggcgtgagggtgtcagcctttttctgctgcctggtgctctaggttggcttgtcacccctggaagcacttgccatccttatacagcaccccacacccacctccccgcctcctaccccttcttccaaggggtcatctctgcttccctccccacccaacctcacccatgtggtccgcccagcaacctttgacccccaacatgacaaaataaacctcccttgccggtcactcattcattcattcagcattgggtgctccctgtggacttggcgctggggtcccgtggaggacaaagccagacacagtccttgccctcatgggactgcacaagtgcaagaccacatcagtaaacgtgaaacacaggaagtgacaggtgtgacaaaggggaccagtggcaggacagaacctgcggttcgtaggaccaggtcaggagggctgcctcggggggacaccttcgggctgagcgcagaaggatgaggggagtaaaccaggctcaaacccagcaggcagaggcgatcgctgcaggcaaccggcaatgtgttcaaaggccctggggcgcggggggctgaggccggcagcacggcaggaagtaagactggggttgaaagagactgactgtcatgttgtgaaatatacacttggttttcatctccatttcctggcacacaactcctaaaatccttggaatctccaaagtgatgtctttttggatgctcatgattgacagaccagctggcagcttcaggatggttcccagggaagaccaggtagaatcacaaggttcagcaccaccccgcaacctccaggtaggggagaggggctgaaggttaagcagatcatcagcggccaatgattgaatcaatcatgccttcgtaatgaggcctccgtgaacactcagaaggatggggttccgggagcttctggatggatgagcatgtggaggctcctggagggtggagcgcctggggagcacatggaagctctgcgtccctcccccataccttgccctacacatctcttcccctgtatcctttgtaatatcctttataataaactagtaaattccatgagccccaggaacatgtgtaaaagaaaaaaaaaagaataaaccatagctgctgtagcaagttaatcctaccagcactggctctcatctgccgaccttacctctggcaatgcctccctctcctgggctcctgggacccctccggccccaccacccctcctgtagtggtctcgctggctgctgccctcaggttagtttatttttacccggcctgctcccaccaggggctgaggcctccttgctcactccagcttcctggcccgtctcttgctctgggcacccccccactccgaacggccagagcttctgaagccgctcgctgtgtgcccccgcctggccccatgcatcccgcacggtgctccccagggtctcccactggcaagggcattggcatagattctggggctgccttggttcaagcccaccctgacttggagcctgagggtccctgagggggtcctgaaggccagggcaggcaaggctggcatgctctgggcagtgggggctgggtatgggaggggatcgtgggtggggagattcctcttaaccagcggcccacgtttggagactgatttgggctccaggctacgccttgaaattgggacagagagtggcgcagatctcagcccggagactccctctgcctgtggacgccctcatacctccatccgtggagccaccctcctctttttttttctaaatggggaaactctgacttgaacactgaataaacaacacaccctcgaaatcagcgaagaggcactggctctgaaactttgccatgaaagcttgaaaatgctctttggaccgatttgctggaacagacgggtgtgatggggctgcggggtttcaggtggcaggaggcgtccccgtgcctagggcatcccgatgctcagagtttccccgtgcccagtgtgtccctgtatccagggcatccccatgcccagggtgtccccgtgcctagtgtgtccctgtatccagggcatccccatgcccagggtttccccgtgcccagggtgtccctgtatccagagcatccccatgcccagggtgtccccgtacccagggtgtccccgttcccagggcgtcctgtgcccagggtgtccccgtgcccagtgtgtccctgtatccagggcgtccccatgcccagggtgtccccatgcccaggcactgcctctccccactttcctaatctccctccaccaacaggtgtcagctgtgaaatgcctgctgtgtgtgtcctttggttgagttcatcttgtgctcttaagttcctgttagacacaggcaggctgctttagttcttctggcaaatgttttgttgttgttgtttgatacggggtctcactccgtcacccaggctggagtgcagtggcgccatctcgcctcactgcaacctccgcctcccaggttcaagcgattctcctgcctcagcctcccaaatagctgggatgacaggcgtccgccaccatgcctggttaatttttgtatttttagtagagatggggtttcaccatgttggtcaggctggtcccgatctcctgacctcaagtgatccacccagcttggcctcccaaagtgctgggattacaggcatgagccaccgtgcctggcccgtctggtgaatgtttattgaggcctactatgtgcagcccctctcttaggtgcttggcctgtaatgaggagcaacaaagacacagtcgctggtcgcttgttacttaacagttggaactgagaggcagtccacaaatgagcaaatccataggtggttttagatgaggactgtgaagaagctaagaacaggttgctgggggtgcatatctgtgtgtgtggcgaggggattaatggaagccctttctgagtggtgacactgagctgaagctgtaatgaccagaaggacccagccaggccaaaatccaagggaagagcaacctggcaaaggaaacagcaggtgtgaaggcccgaggctggagcctggggaaggtgggagtggctggagtgtgttttcagagacgggccatggtgacaccaatgcgacaggcagggccaggtcgtgccgggccttggaggccctggtgagggcttgattttattctcactatggtgggacctcagtgccctgtggctgctgagaatggccaggggcaggcagggaggcctgctagggaggaggctgctgcaggccctgcagctggagagggaggatcaggatctctttagagaggaagttggagagggaggatctctttgattgctggatggacccacctgcctggctgcccccgtcagcatccagcagaggccactggatgctgacaggtggccggccctgcccagccttgcactgccctgtgctgccctggtggctgccggctttaggaggagcgcttttggtgtctgagcccagtggtcctggctgtggtttggtacacttggccgtgggtgaggccaaggtggtttggatcctgggaaggttgggtacctggcagcctcaaggcaggagctggggtgttggaggaggaagcacgctcatccctcgttccttcctgtttcgtgggatgctgagtctctgggcagggacatggtgagccctggtgtgatgcacttaacacctgctggtgcccccatccccaagcaggaaccctggtgcctggtgcctgaggactgctgtccaccgtcccaccatccttcaggtttcttcccagcctctgactcggggcaaggttcagatatccagaacattcttggctggctcttggagctggggtgaggcagaacctccctcccatatttacagcaccagccaaggcttcggggtttggacaccatccctgggaggggtgagcaggacaagtgaggtctccagacttggggtggcttcggactggccaggcaggtgggtgggggctgcagtccatgcccccgctccaggcaacacagtcgagctgcagcccccgctccatccccagctggggctccctgtgctcaccttctgcttccttcctctccctcggaatggggggtggacactccaagactagcctcccagccactctccctgcctcctgcctcctctccttcgggacagacccctgtgatcgctgggtgttcctgatgctctgtcccctctgcgtcctgtgccgtgggtgagagagggcttcggggggacttccccctcttggagcacctgctgctccgggtgcctctgggggcgggcccccacctcacattgtggagctggtgtaggaaggaaggtgccgggagccagctccaattcacgtgctggctgtggccctcaaggtgtggatggcaggaggtggtgagacagggactcattgatcatgggactgacaccccctcatgttgatgtgggccctgagccataatctcaccagctcctgagttttggcgctgctcttggcgatggcgtggactcagccaggctctcgggcagcctttcctggattcttcctccgttctcccctgggcagtgtttctgttcacctggaaaggatgggtaggacttggagacaacagggattcaaagaagtcgggagtgggggcacctgtgcagctcaccctgcagaacagacaatttggttaaagcctaaagcctgctgtcaggagcctcgcttgcctctcagagagcacatggcttgaccatcacggggactgggggagaggcacaggcatgcctgtccggcagcagaagggaaccccgggcctgggcctctccattctgtggcgttgtctttcctcagagttgcactgtctccttcactgtccctgcctggccccagtgctcatgtggcttgtggccctcagtctgggcttggtctcccgcaattcaccctgcccagccccacacagcttgtccctccagctgggaatcggagctcacctggagtcccaggcagcagattcgatgcagtgatgcagggctgtcagccatgccagcaggccctgctgctcacagagggatgggtattgctgttgacaataattaaagaactacggcttcaggctgggtacagtggctcacacctgcaatcccagaactttgggaggccgaggcaggagaatcaattgaatccaggagttccagaccaggctgggcaacatagcaaggctttgtctttacaaaaaataaaaaataataataataataaaaactacagcttcagaatgattgacttcagcatgtttataaagtcaagggtcttcagtgtcctgggcctatgtcactgcgtcagagggagagaggaagaggctggggtgatgggcactggggcttatgctcctcctggaatgggtggtcttggactgtgcctgtgtgatatgtttgtcgagcgggggcggtgtccactgaggactggatgttgaggtgtgggtggggggaggttatgaagcactgggcatttcccgtgcaccagtgccccgagattgcagagaggggacccgcccagcctgggcagggaggcgggtggcagcgaggaaggggagaggaactcgggtgcagaaagcctttcctccagcaggtggcgccgcaagctctcgagagtccagctcctgcggggtttgcattttcactgaatttgtgggcagaggctgcctgggtgtagtttccgccaactgtgactgctcactgcgggcgaggggaagtggagtgcagagaatgcaccggagggcagatgaccagcccccgcacaggcacgggggtgcctccttccccgcacaggcacggggggcccgagcccttggggttcctgtcctaactgggcggggaaagggagggttggaagctgagttagggggaaagggggtggtctcctgccatctcttttattttatttttcctatttttggttgataggtttcaatcttttttacatttttccaactttttgccgtaaaacttttcaaacatagaaaagatgaaagagggctgagtgtggtggctcatgactgtaatcccagcactttgggaggttgaggtaggaggatcacttgagcccaggagttcaagaccagcccgggcaatatagtgagatcccatctctataaaggatacaaaaaattagtcaggcatggtggtgcaggcttggagtcccagctactcggaaggttgaggtgagaggattgcttgaacctgggaggttgaggctgcagtgagctgggattgtgccaatgcactccagcctgggcgacagaacaaaaccctgtctcaaaaacaaaacaaaacaaaaccacaaaaaagaaaccatgaaagattctaaagtaaacacccatgcacctaccacctagattccacagcaaccattttgctgtttgcttcaccacaaatccctctggccaccagcatccacgctggttttgatgcacttaaaataagctgcagaaatcagcacacaacatcctgtcaacacctcagtttgcatttcattaactagagtccggcatttgtctgtgattatttttgtttttctttgaagtaaaatgtatataccctgagatgcacaggtgtgaaacgttccgttctttgaattttaacaaaggtatccacgtgtatcccagcctgaccagaacatagaacatcactatcaccccagtaagttcctcatgcccctccaggtgcatcacagtccccaccttccccagggcaaccacaattgtgctttttttccaccacgaaataattttgccagtttgagtgtttcttagagctacccatgttgctgcaggtgccagcgatttgttctgttttattgctgagtaacgtccactgtgtgaacattctgtgggtttttagtcattctcttgttgaaagacccctggctgtttccatctggaggctcttatgagtaaacctgttacgctggttcttcttgtacaagtttttctgtgcatatgggcgttcatttattctgtagaaacacctagagtaggtatagggtaggtatacatttagttttataagaaactgccagatcttttcccaaagtggcccttccatttcacactcccaccagcaatggatacgagttctagttgctccacatcctggccaacatttggtgctgtcactctgtgaaatcttagtcattctggtgggcgtgtagtggtatcatctcattatggctttaatttgctttggcctgatgactaatgcggttgagcacattttcatgattggctcttcatatatttttcctttgtgaaatgtcttttcaaatctgttgctcattttaaaattgggttgcttgactttttcttctggatactgatcttttgtcagatacgtgttttacaaatattttattccagtctgtggcttgcctgttcattttctttcctttttcaagaacaaggtctcgctgtattgcccaagcaggtctgaaactcctgggctcaagctgtcctcctgcctctgcctccccaagagccggttttacaggcatgagccaccatgcccggcctgttcattttcttagtggtattttccaataagcaaaagtgtgtcactttaatttttatgaagtctaatttaacaaactcctttctttgtggttctctctctgtgttctttgtaagaaacctttgcctaccctgccaaattgcaaagatatttatgttttcctttagaaggcttagagttatatagcttttatgaattaacttttgcatatggtgtgaggtagagggtcagggttcattttgttgtcgttttatgtgtttattcagttgttccaaacttcatttttttttaaagcttttattttgtattttcttggtgacttatgaggtcgcacaattttccaagatccttgttggtcatttacgtattttcctttgtaaaattatctgtccacgtcttacttctttttaaaattatgttgtttcaagatcgagtgatttctgaagccttcattttataatgcttgaaagaatgaacaccttgttccccagctacaggcttctgctctttgtcctgcagctgcacagtggggtaagacttgggttttgttttgttgctgctttgttgtttcttcatttgactgtttccccatgggtctcatttaaaaaaaaaattggccgggcacagtggctcacgcctgtaatcccagcactttgggaggccgaggcgggcagatcacgaggtcaggagatcaagaccatcctggctaacacggtgaaaccccatctctactaaaaatacaaaaaattagccgggcgtggtggcgggcgcctgtagtcccagataatcgggaggccgaggcaggaaaatggtgtgaacctgggaggcggagcttgcagtgagccgagattgcaccactgcactccagcctaggtgacagagcaagactctgtctcaaaaaaaaaaaaaaaaaaaaatgttgtttcatatgttttttatatattctggatataagtcctttatcagatatatgtatcataagtttttttttccacattgctcctttccttttggttttcttaatgatgttatttaatgagcaagagtattttgttttcataaagtccaatttatcaactttttccagtttcgatttatgatttttgtgacctatggaggaaatctttgcctacactaaggtcaaaagaagttctcttattttctagaaattttatagttgtatattctatgattccttttattttttaattttttaaatttttacattttttaacctattatagccgtcaggatgttgtatgatccattttaaatcagtttttgtatttggtttgaggtcagggttaattcttgtttttctatactcatatccagttctagcaccgtttgttgaaaagacataccttactctattgaattacctgacacctttgctaaaaatcattgactgtatatgtggccctatattagtatatgtacgtatatacatgtaggccctgtgttgactgtatgtgtggtcctatattagtatatgtacgtatatacatattggccctatgttgactgtatatgtggtcctgtattagtatatacatatcagccctatattgactgtatatgtggtcctgtattagtatatgtacatatatacatgtaggccctatgttgactgtatatgtggtcctatattagtatatgtacatttatacatgtaggccctgtgttgactgtatatgtggtcctgtattagtatatgtacatatatacatataggccccgtgttgactgtatatgtggtcctgtattagtatatgtacatatatacatgtaggccccatgttgactgtatatgtggtcctgtattagtatatgtacatatatacatataggccccgtgttgactgtatatgtggtcctgtattagtatatgtacatatatacatgtaggccccatgttgactgtatatgtggtcttgtattagtatatgtacatatatacatgtaggccctatgttgactgtatatgtagtcctatattagtatatgtacatatatacatgtaggccctatgttgactgtatatgtagtcctatattagtatatgtacatatatacatgtaggccccatgttgactgtatatgtggtcctgtattagtatatgtacatatatacatgtaggccctatgttgactgtatatgtggtcctgtattagtatatgtacatatatacatgtaggccctatgttgactgtatatgtggtcctgtattagtatatgtacatatatacatgtaggccctatgttgactgtatatgtggtcctgtattagtatatgtacatatatacatgtaggccctatgttgactgtatatatatatgtggtcctgtattagtatatgtacatatatacatgtaggccccgtgttgactgtatatgtggtcctgtattagtatatgtacatatatacatgtaggtcctatgttgactgtatatgtggtcctatattagtatatgtactgtatacatgtaggtcctatgttgactgtatatgtggtcctatattagtatatgtactgtatacatgtaggccctgtgttgagacactattgtgttttcttgatattttgtccattcctttgctgatgccacatcttgattaatgtggctttacagtaagtcttaatataaagtctctcaaatatctaaaatattactttgaatattctaggtcctttgagtttccttataaatttaagaagtagcttgttgatgtctacaaaaatgcagtgtgaattttggttgagattgtgttgaatctgtagatcaattaaggaagaattggcattttaacaatattgagtcttttgtatagatggtatatctccgttttaaaggtccttttgtatttcttttatttctctactgaaaaaaaatctctacagaattacattgttttgtagttttcaagaaaaagatcttgcatgccatttgttaaatttattcctaagaattttacttttggcactattttaagctgaaatagattttaaatttcatttttaattatttgctgctagtatgtaaaaatacaatagatttttgtatgtaaatcttatatcctatgatcttttccaaagtcatttattactctggtaatggttttgtaggtcttttaggatttaaatacatagttttacttctttctgatcttgatgccttgtttttttttcttgctttattgcactggttagagctgccagttcagtattgaatagtagtgattagtggacatccttgcctgtgccaaacttataatgttaactttagatttgtcatatatgacctttgtcagattgaggaaattcccttctattcttaatttgctgaaattttttaacatgaatgggtatgattttagtaaatgctttttctgcatctatggaaatgatcattgttttgtcttttattcgtttaataggataaattacaatgattgatttttgccccccgttttttttttttttttttttaaagaaacagagtctcactcttgcccaggctgtagcacagtggtgccatcgtagctcactgcagcctgaactcctggacttaagcaatcctcccacctcagcctcctaagtagcagggactataggcacatgccaccatgccaagctaatttttaatttttaaaattttttgtacagatggggtctcattgtgttgctcaggctggtctgcaattcttgagcttaagcaatactcccacctctgcctcccaaagtgctgagattacaggtgtgagccactgtgcaggcctgattttttaatattgaaccaaccttgcatttctggaagaagtccaacttgcttatgagatatcatcctttttatatattgctaaatttgatttgcccagtttttaaggatttttgcgtgttgattcatgagggatattggtgtggtattttctttgtttgttagtttgtttcggtaatgtctttgtcagcctcattttggcttcataaaattagtttggaagtgttcccttctctttgttttctgtgttttcataaggttgatgttgtttcttccttaaatgtttgatagaatccaccaagaaaaccgtctggacctagaattttctactaggaaaggtgattgtttgtttttaatcacaaattcaatttaatgtatagaaagagttattcaggtttttttacttccccttgtcttacttttggtaagttgtactttgaaggaatttgtccctttcaggtaagttgttgaatttactcatttaaagttgttcgtaatacaagcatacctagggtttgcttccagacctcggcaataaagcaaatattgcaataaagcacgtcacacaaactttttggtttcccagtacatataaaagttatgtttaggccaggcatggtggctcatgcctgtaatcctagccctttgggaggccaaggtgggcggatcatttgaggttaggagtttgagaacagcctggccaacatggtgaaacctcatctctattagaaatacaaaaattagctgggtgtggtggcacatgcctgtagtcccagctgcttgggaggctgaggtgggagaattgctcgaacctgggaggtggaggttgcggtgagctgagatcacaccactgtactccagactgggtgacagggcgagactccatctcaaaaaaaaaagaaaaaagttatgtttacactatactatagtctattaaagtgtataagatcattatgtctttttgctaaaaaatgctaataatcatctgagccttcagcaagccataatctttttcttggtagaaggtctgcctcaatgttgatggctgctgaccaggtggtggttgctgaaagttgaaggtagctgtggcagcagtttctttgtttcttttttctttttctttttttttgagacagagtcttgctctattgcccaggctggagtgcagtggcacgatttcagctcactgcaacctctgcctcccgggttcaagcaattctcctgcctcagcctcccgagtagctgggactacaggtgcctgccaccacgcctggctaatttttgtatttttagtagagacagggtttcaccttgttggccaggctggtctcaaactcctgacctcaggtgatccacctgccttggcctcccaaagtgctgggattacaggcgtgagccactgcacctggccggcagtttcttaactgaagtttttgacatgggttgactctttctttcatgaaagatttttctgtggcacgcattatgtttgatagcatcttacccacaatagagcttccttcaaaattagagtcaattctttcaaccctggccacggattgatcaaataagttgatgtaatattctaaatcttttgttgtcatttcaacaatgttcacagcatcttcgcctggagtagatcccatctccaggaaccactttgtctgctcatccataagaagcaactcctcatctgttcaagtttgatcatgggattgcagcaatccagtcccatctccaggctccacttctaattctagttctctgctatttccaccacatctgcagtgacttcctctgctgaagtcttaaaccgctcatccatgagggttggaatcaacttcttccaaactcctgttaatgttgatatttcaacctcttcttgtgaatcacaagtgttcttaatggcatctagaatggggaatcctttccagaaggttttcaatttactttgcccagatccattagaggaatcactaactatggcagatactgctttataaaatatatttcttaaataataagacttgaaaatcaaatttatcccttctccatgggctgcagaatgggtgttacattagcaggcatgaaaacaacattcatctttacatacatctccgtcagagctcttgggtcacaaggtgcattgtcaatgagcaataatattttgaaaggattcttttttcctgagcagtaggtctcaatgatttttttttttttttgatggagtctcgctgtgtcacccagaatggaatgcggtggcatgatctcggctcattgtaacctctgcctcccgggttcaagtgattcttgtgcctcagcctcctgagtagttgggattacaggcacacaccaccatgcttggctagtttttgtattttttgtagaaacagggtttcaccatgttggccaggctggtctcgaactcctgacctcaggtgatccacctgcctcagcctctcaaagcattgggactacaggcatgagccactgcaccgggccctatttgttttttttttgttgttgttttttaattgagacagagtctcgctttgttgcctagactggagtgcagcagcgctatctcagctcaccgcagcctccgcctcccaggttcaagtgattctcctgcctcagcctcctgagtagctgggactgcaggtgtgcactaccatgcctggctaatttttgtatttttaatagagatgaggtttcaccaccatgttggccaggctggtcttgaactcctgaactcaggtgatttgcctgccttggcctcccaaaatgctgggattacagctgtgagccaccgtgcttggcccttttttgtttttttgttttttttcaaattgagacagagtctccctctgttgcccaggctggagtacagtggcacgatctcggctcactgcaacctccgcctcctgggctcaagcggttctcctgcctcagcctcccaagtagctggaattacaggcgtgtgacaccatgcctgaataatttttgtatttttagtagagatgcggtttcaccatgttggccaggctggtctcgaactcctgacctcaagtgatccccccgccccagccttcaaaagtgctgggattacaggcgtgagttgccgcaccaggcctcaatgggtttttaatattcagtaaaccatgctgtaaacagatgtgctgtcaagtagggcctgttattccatttctgaagcatagacagaatagatttggcagaattcttaagggccctaggatttttggaacggtcaatgagtattggctttaacttacggtcaacagctgcgttagcctctcatgagagtcagcctgtcctttgaagctttaaagacaggcattgacttctcccctctagctatgaaaatcctagatgacatcttcttccagtagaaggtgggacatctatgctgaaattctgttgcttagtgtagccaccttcatcagtgctctgagctagatcttctgggtaacttgctgccgcttctccatcagcacctgctgcttcaccttgcacttttacattatagagatggcttctttccttaaacttcatgacctgacctctgctagcctcaaactttccttctccagcttcctcacttctcttagccttcataccattgaagagagttagggctttgccctggattaggcttttgtttaagggaatgttgtggctgatttgatcttctatccagaccactcaaactttcttcatatcagcattaaggctgttttgctttcttcttcttcatgtgtgcactggaatcgcacttttaatttctttcaataactttttcttggcattcacaacttggctagctatttggcataagagatctcacttttgcctgtcttggctttcgacacgccttcctcactcagcttaatcatttctagcttttgatttaaagtgagagacgggtgactcttcctttcacttgaacacttagaggccattgtagggttattaattggcctaatttcaatattgttgagtctcagggaatagggatgcctgagcagagggagagagagcggggaacagccagtcagtggagcagtcagaacatacaacgtttattgaataagttcactgtcttatctggatgtggctcgtcatgccccaaaaacaactgcaataatggcattgaagatcactgatcactgggcgcggtggcccatgcctgtaatcccagcactttgggaggccgaggcaggtggatcacctgaggtcaggagtttgagaccagcctggccaacatggtgaaacctcgtctctactaaaaataccaaaattagccaggcgtggtggcgggtgcctgtagtcccagctactggggaagctggggcagaagagtcgcttgaacctgggaggtggaggttgcagtgagccgagatcacaccactgcactccactgcactccagcctgggcaacagagcgagactccatctcaaaaaaaaaaaaaaagggccgggcgcagtggctcacgcctgtaatcccagcactttgggaggccgaggcgggcagatcatgaggtcaggggattgagaccatcctggctaacacgatgaaaccccgtctctactaaagatacgaaaaaaatagccgggcgtggtggtgggtgcctgtagtcccagctactcgggaggctgaggcaggagaatggcgtgaacccgggaggcggagcttgcagtgagccgagatcgcgccgctgcactccagacagagcaagactctgtctcaaaaaaaaaaaaacaaagaaagaaaaaagaaaaaagagatcacagatcaccatagcagatataataataatgaaaaagtttgaactatttcaagaatcatcaaactcctacacagagacacagtgttaacatgttgttggaaaaatggtgccagcagacttacttgatgcagggctgccacgaaccttcaatttgtaaaaagtgcagtatctgtgaagcacaatgaaatgaggtgtgcctgtgttccttgtcactgtaatgtcggtaggatccgtaaggaaaacacttcattccttttattgtgactttatgttcgccatctccctctcatcagcagcctggctaggaggttatcaatctagatctttttaaagaaccagcattggactccccttttctggtgtccatttccttgagtttctctgttatcttcattacttccttccttgtacttgcttcagcgcattagtcagggcccagtcaggaaacaaaaaccacaccggcaatttgaatagcaacttgtaatataaagtgttcttaactgtaagaggtagttaactattaaagggatcacaaaggggtgacattgtgatataagaaagatgtatttgggctgggctcggtgcagtggctcatgtttgtaatcccagcactttgggaggctgaggcaggcggatcccttgagctcaggagtttgagaccagcctgggcaacatggtgaaacctcatgtctaccaaaaatacaaaaaattatcctggcgtggcggtgtgtgcctgcggttccagctacttgggaggttgaggtgagaggatagtttgagcccgggaaggcagacgttgtggtgagccgagattgcactactgcactccagcctggatgacagagggagactctgtctcaaaaatcaatgtatctgtctgtctgtctgtctatctatctatctatctatctatctatctatctatctagtctctgtcccccaactttgtttggcatgtagctcctaaaactcttgaaatctccaaagtgatgggtgtctttttgtttgctaaggaggcgactggtggctggaggctcctggacagcctggggataagggctggttgccaggggacccagccttgtgattagaaggctagaacttgcagcctttcccatccacctcctgcgaggcaagaggggatgaaggttgagttgatcatcaatggccaaagatttcatgtcatgcttatgtagtgaagcctccctgaaaacccaaaaggatgaggtttgtagagtttcaggttgttgaatacctgcaggtgctgggagggcagtgtaccctcccgtggaagctccatgccgcttccttcatacctttcttatgcatctcttccagttggctgttcatttgtatcctttgaaatatcatttgtaataagtcagcaattttaagtaaactgatttcctgggttctgtgagtcactcaagcaaattattgaacctgagaagggagttgtgaagacctcaaatttgtagccaagtcagacagaagttatgggtaacctggtgtcttaccacttgcgactgatctctgaagttgagggcagtcttgtgagatggaacccttaacctatgggatctgcactaactctggttggtgtcagaattgaactgaattgcaggacacccagttggggactgctgagtattggagaattgcttgggggtcggcgggaggaaaccacacatctggtgtcagagctgaagcactgagtgttgtgaatgagagtggagagatagagtttgttttgccttatgcaagaggactctaaggagtatagaaagagcaaatatgagaagcagctactttagaagaaaacataggaggaaagcttcgtgacattggagttggcaatgctttcttggatgtgacaccgaaaatacaacaaaagaaataaatgataaattggacttcaccaaaacttaaaacttttgtgcatcaaggaatactaccaatggcgtgaaaaggaaatccacagaatggaagaaagtatttgaaaatcgtatatccgataaaggactagtatccagaatatataaagaactcctacaactaagccacaaaacaaaaaaaaacaacccagtgaacagacatttttccacagaagacataccaatggccaagaagcacaggaagagatgcgcagtgtcactaatcatcagggaaatgaaaatcaaagccacaataaaatatgatttcacaccctttaaggtggctgttagccaaaacatggataacagcaagtgttggcaaggatatggagaaattggagccccgtgcactgctggtgggaatgtaaaatggtgcagctgctgtggaaaagatataacaattgctcaaaaaattaaactcagaatgaccataacatccagtgattccacttctagatgtatactccaaagaactgacagcagggacttgaacaggtgtgctacattcttgtttgtagcagcacttttcccataaccaaaagatgcaggcaacccaggtgtccaccagcggatgaatgaacagacaaaatgtggtccatctgtacagtggaatattattctgccttaaaaaggaaggagaggccaggtgtggtggctcacgcctgtaatcccagcgctttggaaggccgaggtgggcagatcacttgaggtcaggagtttgagactagcctggccagcatggcgaaaccctgtctctgctaaaaatacaaaaattagccaggcatgggggcatgtgcctgtaatcccagctactagggaggctgaggcaggagaatcgcttgaactagggaggtggaggttgcagtgagccgagaccatgccactgcactccagcttgggcgacagagcaagactgcctcaaaaaaaaaaaaaaaaaaaaaaaaaaaggagattctgacacatgctatagcatagatgagccttgaagacatgctaagtgacagaagccagacatgaaaagacaaatactgtatgatttcacttttatgaggtccctagagtagtcaaattcagagagacagaaagtgggatggaggttgccagaggctgggggaagggagaatgaatgggaagttggtgtttaatggggatagaattgcagtttgggaagatgagatggatggtggtgatggttacacaacagtgtgaatgtgcttcatgccaccaaactgcacacctgaaaatggttaaaatggtaaattttctgtgatggatactttaaggcatgtatgcaaacacacagaagcagttactaccactggggttgatggaaaagaaaccaagaactcggagcgtcctccacaccttgccacgtcttacgttcaggccttgttggagagtgtgtgactgccacagaaacctgcagcctactggtaacaaaaaggttcttgccagaaggtgtagaaagagtggatctgcaggatcagcttactgggtagccgagaaacctactagagggtatgggtgggcaggagctgggtgtctgagaagtttgctgaggtcccattgggctagagctggggtgctggagaaactcagtacagagcaggccccactgggcacacgccactggcagctgtgccttcagaggaaaaagagaccctggaaccaggaagagaagctgctacctcagcaaggcctggcagctccccacagtgttgtcccctgtggatagagcctgacatgactgtatttggccaaggagaaagactcataaggcctcggtccagtatcacggagcggggcctggcaggatgtatgcagagttaagaggcaatacatgggtaactggcatatttttccagattctttgttttttttgttgttttgttttgttttgttttgttttgttttgttttgagagagcatcctgctctgttgcccaggctggagtgcagtggcatgatctaggctcactgcaacctccacctcccgggttcaagccattctcctgcctcagccttctaagtagctggagatgcccaccatgcccagctaatttttgtatttttagtagagacagggtttcaccatgttggccaggctggtcttgaactcctgatctcaggtgatccacctgccttggcctcccaaagtgctgggattacaggcgtgagctacactgcacctggcccatttttccagattcttaaagcagatccttaggtctttttttttttttttttttttttttttttacttcttttctaatataagcacttacagtttccctctaagcactagcttcagcctacgtattttagtatgctgtgttttcattatcatttcatttgaaatattgtaaaatttttcttgtgatttcctctttgactcatgggttatttagaagtatgttgtttaatttgcaaatagtcaaggctcctctgagtatcttagagctattgatttctaatttaatcttactttggccagacaagcatattttgcatgcttttaaaatttgagacttatggcccagaatgtgtatcttggtgaatgcactgttttcacttgagaaaaaaatatgtatatatattctagacttcctgagtatagagctttataactgctgattaggtcaattgctagttaccagtgttcttcagattatctgatgcttgtttctcagatgttgagagaatggtgtttgctatggcctacctgtttgtgtcccccaaaattcatatgttggagcttaatctctggtgcagtggtgttgggaattggggcatcagggaagtattggctcatgagggcagagtcatcgtgaatgggattagtcccttctgccatgtggggacacagcaggaaaaggacatctctgaagcagggagctagctctcaccagacactgagcaccctgattttggacttcccagcctctagaactgtgagcactacaatctgtttataaattacccagcctaaggcattttgttttaacatcctgaatgaactgaggtggtgttaaaatctccaactatgcatccaggcgcagtggctcacacctgtaatcccagcacttcaggaggccaaggcgggtggatcacctgaggtcaggagtttgagaccagcctggacaacatggtgaaaccttgtctctactaaaaatacaaaaattagctgggcgtggtggcaggctcctgtaatcccagctactcgggaggctgaggcaggagaatcgcttgaacccaggaggtggaggttgcagtgagccgagattgcaccattgtactccagcctgggcaacaagagtgaaactccgtctcaaaaaaaaaaaaaaagagtctccacctatgattgtggaattgcccatttctccctttaattctttcaggttttatatcatgtattttgaagctcctttggttaggtgcatacacatttatgattataatggtgtctcgatgaactgatcatttaaccatgatgaatgtattcctttatctcgtaataattttatcttggactcaactttattgatatttatgtagcctctccagccttcttaaacatgctgtttgggatgcataagaaggctggagaggcttatggagaaacttatgatggtttgacttacagtttttcaactttaccatggtgcgaacgtggtatgtatacagtagaaactgtactttaagtatgtgtgaaaccattgtgtttctcactttcagtacagtattcaataacttacatgagatagtcaacactttattataaaataggctttgtgtttgttgattttgctcaactgtaggctgaagtaagtgttctaatcatgttaaggtaggctaggctaagctagaatgttcggtaagttagatgtattaagtgcatttttgagatgatatttattttccacttatgatgggtttgtcaagacataactccatcatcattcaagcagcatcagtatgtctttttccaaacagaaaatttcaacctgtgtttatactgaaacagcatcttttgtagatagtatatagttgagtcttgctattttattcattctgacagcctccgccttttaattggaatattcaggctatttctgtttaacatagttatagatatgactgggtttagagctactaccttgctctttgatatttatttctttcatcttgctttcttggcttcttttatgttaattaagtattttttagaattctattttaatttatgttttttttttttttttttttttaagacagagtctcactctgttgcccaggctggagtgcaatagcatgatcttggctcactgcaacctctgcctcctgggttcaagtgattctcctgcctcagcttccctagtatactgggattacagacgcctgccaccacggccggctaatttttgtatttttagtaaagacggggtttcaccatgctggccaggctggcctcgaactcctgacctcaggcgatccgcccaccctggcctcccaaagtgctgggattacaagcgtgagccactgagcccggcctgttttgactttttaattgtatctctttgtattgctattttagtagttactttatagattctattgcacattcttagcttttcacagtctacttagaattaacattgtttttcttcatggaaaaaaagtgtaagaactaggcaatcctatgggttcatttaccactttccatcctgtatgtgatggttgttagatatttactacatccatacacattgtaaactagacaatacaataaggaaatttttgctttaaacagccccatgcattttaaagaaattaaaagtaaaacagaatcttttctatttgcccatgtatttgctatatcctgtgctcttcattccttcctgaagagctgagttcccatctggtctcatttcccatgatcttggagaacttgcttcacggtttttgtagtgcaggtttgcagacagctaattccctttcattttcacttatctgcaaatctttattttgctgtcattctttctttttttatttttatttttatttttgagacagagtctcactctgtctccccacaggctacagtgcaatggtgtgatttcaaaactcctgcccaatctcaactcaccaaccttctcctcccgggctcaaacgattctcctgcctcagcctcccaagtagctgggactacaggcatgtgccatcatacccagctaatttttgtatttttagtagagatgggatttcaccatgatggccaggctggtctcgaactcctgacctcaagtgatctgcctgctttggcctcctaaaatgctgggattataggtgtgagccactgtgcccagcctgctgtcattcttgaaccataatttcactggttatagaattctgagttgtcagttttttctttcaggactttaaaatatagggttccagtgtctttggcctccgttgtttctgtcaaggaatcagcattcatctagctattcccctgtagaccacatgttgtttttccctggatgcttttaagactttttatccaagtttgattgctcagtacctacctctgggcaaaaaagcctccagaaaccagaaacttatctagttttattcccctctgtcaggtgtagactctactccagcttctacctacttgagatattctatactgactccaggctgttgttattttgttctttcaaatattttgtccagagctataatgttttctgcagaattgaccagatagcagctactctctgtgaccaggagccttgatcttccagacttgctgatgggctcacaaagctcctgcccgtggccctcagttggcagtggcctctctgccttgaagttgccatgagtgtgtaaaacctacaggctcaaccttcctcattagtacagtccagaaaagtggaattcctggtctgggtggctatggtgccctagaccactggctagaccagggtggtgactgccagctggccgaatgtggggtctccagcctagcacccttggactctaccccaggagttatggctgtttcagggccaggggcctggcctcagcccctgtcccccttctcttctcctcaagttgcccagcatcaggtcccaaccagcatcttttgcagacagggtgggtcggctcctcactagaggggcagggttgggcgggaagcctgttgagccctccttcctgtgcagcccacagccctggggttagctccagaggggtgcagaaaggagcccccaaaggcagaaactcacccttctctctgttcttgtgcttccagggataaaggagaggtggtcctagctggggggctaccagtggcatgcaggaggcccacatgaccactgtttgctggggcctttccttctctgtgagagagacgagagagaggagagagagtgtgagtcagggtagtgtcttcttccagtaacgcagacttctgcacgtgttctctaggagaaatcccgtcactcgctagagctctagatctggaagaagctctgcctctcttctctcctccagtgcagtgtgtgtgtgtgtgtgtgtgtgtgtgtccccacatgcattacacccttctacagaggaaataattcccgtccaagtgcaaaggttgggattggagcaggcagcatgtgggctaaaggagcagagaggaggaaacgggggcgggggtgagggtgggaacaggaggtgggtagatgccacgaggcatgccttccacaactagaagggctggtggagatgaccagaatgctccagacagaccttttatcaaacttccaaaattcaatcttgtttcatgaagcctgaggaccctgcagagtgaaagacaaggaagggctttcctgcaggggggtgtgtgtgcctgtgtgtgcctgtgtgctgtgtgcccccatgtgtgtgcacgtgtggacctgtgtggtgtgtgcctgcacatgtgtgcacgtgtggacctgtgtggtgtgtgctgagtgtgtatatgtgtgtgcctgtgtgctgtgtatgcacttgcacatgtgtacacagatctcattttccttttttctggcttactaagtgccagaaagaatttccgtgagcctctccacccttcccaaggctgcacatggagggacttgcgcaggcacatgtgcgcgtgcacacaacacacacacacacacacacacacacacacacacacacacacgagtcaggggcgagcactcctgtggattgtacctaggcctggcaggaaaccgggttctgggaaactgtaggccccacctttggcagaaaaccatgtttttgttgctgctcgttgaagggaacattaagtggggctggggacagtttatgttgagaagagcaaattttgcctatggcactggggacattgagtggctcctgtcccgggctctggagggcttgggagacacgtctgcagctctgggcatctctcaaggtcacgggcggccacactcaaggttaggccctcctctgtgtgagctgcggtcagcaggaaggctgacctcagaggcggccccagggcccttggaggccctgcccctgagacatgggccaaggtcagagagccgagaaggctgctgctgaggactctggttggcgcccagcccagcggcccttcaggcgggccctgtgcaggggctgatgaagtcagctgggaaatctgtgaaataaagcacaggtcccccaggcttgcccagagccccggcatcagatgaggtgcagagaagggaactgagctgccaagtgtgaacaggagagaggagccccaggaccacacaggggccccgacatggcaggtgcttggtcagcagcggtgctgcccttactgctggacgtgggaaaatgcactgacacttgctgaccagagccggggtgagcatctgggtgaccctgcagatgagacaaaataagggctgccgtgggggaggggcccttgccgggccaccctgctgaggccctgtgttactgtcctgcggctgtcataacaaaggaccacaaatgaggtgactcaaaacatccgaaatcggccacgtgcggtggctcatgcctgtaatcccagcactttgggaggccgaggcggttggatcacgaggtcaggagatcgagaccatcctggctaacatggtgaaaccccgtctctactaaaaatacaaaaaaaaaaaaaaaattagccgggcgtggtggtgggtgcctgtagtcccagctgctcaggaggctgaggcaggagaatggcatgaaccttggaggtggaggttgcagtgagccgagatcgcgccattgcactccagcctgggtgacagagcaagactccgtctcaaaaacaaaaacaaaaacaaaaacaaaaacatccgaaatgtcttccctaaagtttctggagccagaaatcccagaccgaggtgtctgaaggttcattcctcctgggggttccgagggagactgtcccatgcctttctccgagctctgcggcggccagcaacccctggtattcctcggcttgcagctcggcctaccccccacctggccttcaccctgtgtctcttcttgtgtctctgtccaaactgccctctctgttgtctttttaatttatttttagggacaggttctcattctgtcctccaggctggagtgcagtggcgtgatcatggctcactgcagcctcagcctcccaggctcaagcaatcctcccacctcagccttccaagtagctgggacacaggcgcacgccaccatgcctggctaattttttaatttttttgtagagacgagggcccaggctggtctcaaactcctgcgctcaggcaatgagactttgcctcccaaaacactgggattagagacatgagctgctgtgcccagcctacctctgtcttataaagacacctgtcattggatttagggcccactctgattcaatatgccctcaaataacccaattacatcttcaaagaccctatgtccatataaagtcacattcataggtactggggggtcaggacttgcatatgtcttttgggggaacacaattcaacccacaatgggtctcacccacagaacgaacggcctctccagggtgtgcgcaggtgggtgaggggcccaggagagggacctgcgtggcaagagggcttgtgttcacgtcagagattccagaaggagactggatggggtggctgcatggagcaaggggctacagccactgtctccaagtagttggtgggttgtctggtagaaagggagcatttattttgagttcccccaagatatgaagctagtaccaggtacctggaaggtgctagcgagtagagcttgactctttacagaaagaggtgtttttctcacaatgttcacttgaggacggtggaacaggctatttcacaaggtagtgagttccccatgcctggaagcattcaagcaggggccatgtgggagttgttcaggagtgcatagaagggacctcagaggtccctgccaataccatctttgcttgtcttattttacgacaacttgaatttcagaatgtaatgttattggggatatgtctactagaggggcctccagcatcaggccccacacactatgcatcatttttagggcagggaatgagagcaggctccattctttttggttgtctgtgaggaccaggaggcttgctgctgaggcagcttcctgtggaaacagtgtctcagccccgcaatccattcatcggagctccaacatcttaatgaaacactgtgtcagatgggttctgggcatgtgtgtgcagattgtcacaagtccatgagaatgcacacacgcacattgcatgtgtgtgcacacatgtatgcacacatgcacaagaacacgaagacccgaggcaggtatagtccgtgagacagatccctctaggctgaaagactccccacaagggtccctagaacaaggctccagcctcggcagtccctcccacttctggtgggaggatctccacagagaagaagggtcaagaagcacagctcttgatgctcacggtgtaccaagctctgctttaagcttgtgtcttattttttacttatttagcaaatctgtcgctcttgttttgtgccagatgctgttctcagcactttacaaatattgatgcatgtttgtttcatgacaaccctgtgaagtaggtagtgttaccccgttttatagatgaggaaacaggcgtagagggataaagggacttgcccaaggtctgtctctaccttacacgcacatgaacgctcactcatgcggcaggcgctagtttccctctgatgtgagtcaggccttgagctggttggggtctgggtcccactttggttgtgttttgctgtgggcaccaaggaagcttctagcagcctcatctccctggtatgacctagctccagggactggatttccccaaatgctcctgcccagcctggagcctcctttccagctgggggagggctgaacgacccctcactcttggaggctgccggagcccctcctgcctgcatgcggccgctgccgggtggacaggcctgcttgtgggttgaggctcccagcagctggggtggatcatttctcctcccaagaagctttgggagaagcagctgagggggccagcgtcctcctgaggccaattccctgcctcccccagcgcaggcgcgaagccatctttgcttgtgtgtttgccacagacagtggagggcggtgcaatcgtgacgcctgcttgttgcactttgcgtccttgaggacgttgacccctggccggtgctgggcgcttgctcttcagtcatcttgccctgacctggcgtggcaggcccgagcactgctcttttacaaggaaacaggctcagaggccttgagtcacttgcccgggctcccccagccaataattggctgagccaggatttccatccagctctgtgactccagaagtccaagttcttcccatcacgtcagggccaggaaaggattagaatgcttttctacgtgccgattatttggatgatctgtgcagcttagctcgttgtagttgctcaataaaaatgtggaatgaatgggcctatatgtcccattgtgtgactcagagccaatgactctggctgatcctcctgttttcattccgtggcccagcatctccctttggggtgtgtgaccttggaagcagtgactctctccatcccaccttgaatggtgtctgcgccgcagcaggggagcagctggggattgccagcgcctgttgctggtgggctgtgcgccagatcccgtcttggatgtgtgggtgattgtcagccacatgtgtgtgaagggctgtgcgtgtaggatttgtgcaaatgtgcccctccctgctgccagcccatgggaggctgtcaagattctgcccctgcacattagcccacactctctttgtggcccactgctgtggctgttcccttgtgtcacgtggctgcaggcacagcccccaagtggatggggatcgtgggctgaatgtgcatcagatgctcctgcttcttggtgggtggagaccctcaacccatgcaccgtggctgccgcatctgaaaggccttccatggtgaaggacttggacctgagcaaccctccgcagaggtcttagaagtgctccctggccgggcgcggtggctcacacctgtaatcccagcactttgggaggccgaggtgggcggatcacaaggtcaggagatcgagaccatcctggctaacacggtgaaaccccgtctctactaaaaatacaaaaaattagccgggcgtggtggcgggtgcctgtagtcccagctactcgggaggctgaggcaggagaatggcgtgaacccaggaggcggagcttgcagtgagccgagatcgcgtcactgcactccagcctgggcgacagagcgagactccgtctcaaaaaaaaaaaaaaaatgaagtgctcccagctcttcctcctgtggtgaggttctgagtttccatcctcagaagaaaacctggctggggagggcatctctagacccggacataaacgccaggagaccagggctgccctctcaggtgaccaatcacagagactcagggaaagtcacgtttggaagaggcgacactgtgtctcagcctcattcatttctccatcctacagacactgcctggtgcccagcccgcaccgcgaggcttcctaagcagctctgggcaccgtgcacctggcatggcctccagccccatctccctgccttgggagacccggtggggactccgggctgagctcctgtggctgtggaaccttggtggtttattgtggtggctgagaacagggacgtggggttggacgggttgagtgtaactcccagtggctccgtgaactgcctgggagccttgggcagctctttctcactctgtgcctccgcttcctgatggaaaaatgggggccaggggggagcgaccttgaaggtattcgtgggaaccaagcgaggtgataaatgtagtgtccttggtagagaactggacacagagtccacccccatgaagggggctgctcctcctccttctatgtttcctcttgttcttatttctcctcttgtatcttctcttcctgctttccctccccctcccctccccccccacatgcaggcacactccatttggtgccccaactgcctttctccattgtccttctgtaagtggttctctaagtgggaactcaggcctggaaagggtgggcaccctgtctggtgggctctggcaggccaggcgctgagcagcctcaggagacacaaccctaggaaaaggctcatgcaggctggctgtcatgacggactgttggtgggagaggggaaggcgccgtggtaggggaagctttggaaacatccactagtggccttatttatgactcaggacacctgccaggtcactagaacacagctgaggaagctgtcggccagacgtccagaagcatcaacctggtggctgggctgtggggggacctctctggacaggcagacaaggtgtcggaggaaggggctgacactcactcagtgtctgtcatgcactgagggcacaaagggcaggatggagagctggcccacgccacctgtggaatcttccaggtgtgggggcagatggggaagcaagggggcttgaagacacatgcgctcattaaatgtccttaaatcccaagaagaagaacaaggacacatccacaggggcagggctgaaagtctgatgcatggtgttttggggtctgctcctgctgcaacagctacagtggctccctcttacctttctcttccctccattctgttgtgaaaatgttcaaaacacatggtcaagttgaaagcattttacagggaacacattcagccatcacctagattctaccactaacaccaagctacacctgctttatcacctcaccgtccatctatccctccttcgcctggccatgaatccattttatttttattttttggtgcatttcaaagtaatttcaggtcatcctgattatctctggaatcactgtcagaaattccctcccttcccctcccctctcctttcctttccttttctgagatgggatcttgctaggtcacctaggctgaagtgcggtggtgcagtcatagcacactgcagcctccaactcccgagctcaagcaatcctcctgcctcagcctcctgagtagctgggaccgcaggcatccaccaccacacccagcttcattttcaaaatttctcaccaactcctcactccttgtattcacccaggaccacttctcacaaagccagggtgctgcaggaggggtcagaaccccaagccctaatcctggctctgtcattaacactgtgcgaccctcagcaaatcattttgcctgtctaggtcctgttttcattcctatgaaacgagggcgttaaactgtatgttataaataatgagggctaccagttaccaagctcctattttaggccaggcacttttcacatgttattatgagtcctttcaatctaggtattgttctcaatggacagcttagtcaacggaagctcagagaggtggtgtaacttgccaaaagtcccactacccagtgaatgtccccacggggtctgcacccaggagtctgacacagagcccaggcctcagcacctggcgatgttttgggggtgtgagcagcccagcctactctgggcacgtgtttacttgctgttccttctgcctcatgtttgtgtttgtcccctctgaagctcagactgttattttccagttccaaataccaaaactggctaggcacggtggctcatgcctgtaatcccagcactttgggagaccaaggcgggtggatcacttgaagtcaggagttcaagaccagcctggccaacatggtaaaaccccatctctacaaaaaatacaaaaattagccagacatggtggcgtgcacctgtagtcccagctactcaaggagaacccagctacccagctactgaggcacgagaatcacttaaacctgggaggtggaggttgcagtgagccgagatcgcaccactcctctctaggctaggcaacaagtgtgagactctgtctcaaaaataataaataaataaaataaaataaaaattaaaaccaaatgccaaaaccaacccacaaaataaaccttggttaaagtagcctgttcattttgctttaactatgtatattgcaccagattctgccaggggctcagcgtataaagatgagacccctgccctgccagacaggtgggatgatggccataccttgagttagtcaaggcaccatctggctgtgtaacaaaagctaaaacatcagaggctgagcagcactcggacccacgtcccagtccaagtgtcagtcgttatgggggcccaggacagcccggacctagttcattcctttggtgcatcctcgacacacagcttccatctcttgagctgagatggttccagctcctgccgtcatgtctgcactccagccagagggaagggaagaagggagaggggaaagggcaagtgtccctctttatttttaagggcatgacctgaaagttaaacacttcagctccttcccactggccagaacccagttgtatggccgctcctgtcatcagggaggctgagcaatgtattcttcagctgggcttccctgtgcacaaccaaaacttcagttactatagaaaaaagggagctcagatattggggaaacaactagcatctgtaccacatgcactgatagctctctttgtatgaacagagctgtggcaggccctatgccagggagaaagtaagattggaaaagagcttaccaaggaggtggcatttgcactgtgcttaaggggcaagaaaaacgtcttccaatcaggagccacaaatgcttggctgaagtgctactgctctttcatcctggagctggaacagacgtcaccagtcaatcatgatggctgctgggtgcactggctaacatctataatcccagcactttgtgaggctgagggtgggaagattgcttggggccaggagtttgagaccagtttgggcaaattgcaagaccctgtctctgcaaaaaaatataaaatgtagctgagtgtggtggcacctgtagacccagccccagctactcgagaggctgagatgggaggatcgcttgggcctaggagttcgaggctgcagtgagctatgattgcaccactgcactccagcctgggtgacagagcaggacctgtctctaaaaacaataaaataaaatcaaagttttaaaatggaaaaaaaatcatgagcacataactccagatgtatcctcaagatagcaaacccgggtgggcgcagtggctcatgcctgtaatcctggcactttgggaggccaaggtgggtggatcacctgaggtcaggagtttgagactagcctggccaacagccccatctgtactacaaatacaaaattagctgggcatggtggtgggcacctgtgatcccagctacttggaaggctgaggcaggagaattgcttgaacccaggaggcggaggttgcagtgagccaagatcacaccattgcactccagcctggagaaaaaaagcaaaactctgtctcaaaaaaaaaaaaaaaaagcaaacccagggccaggtctgtagccacatggccaccttcttccctgagcatggaggcagcctcagaaacctgccccacatcacatcagtgggcagttgattgggtcagcctgccagttgaaccctatttgccacagtcattctccatagtaaggggcattctagacataccccccttcccagggaagaataagccgtagctgcctgagcgttttatccagtggtgtgcatgtcttttcccaactctgtgtttagtgatgtcctgtttgtagcttgaaatttgccacagtgggtgtgtttacaccacaggaattggcaaacactacatatcaggccttacctcctgctccctactagggtaggttgttttttttttgttgtttttgttttttgtttctttttttttttgagacggagtctcgctctgtcgcccaggctggcgtggagtgatgcgatctccgctcactgcaagctccgcctccctggttcacaccattctcctgcctgagcttccagaatagctgggactacaggcgcccgccaccacacccggctaattttttgtatttttagtagagacggggtttcaccgtgttagccaggatggtctcgatctcctgacctcgcaatctgccctcctcggcctcccaaaatgctggcattatgccactgcgcccggcctagggtaggttgttagaaatgtaccagcctgccagtttcagccttgtttgtctttcatcctttttttttttttttttttttttgagacggggtctctctctgttgccccccaggctggagtgcagtggtgtgatcctggctcactgcaacctctgcctcctgggatcaagtgattctcctgcctcagcctcccaagtagctgggattacaggtgcccaccaccacgtccagctaaattttgtatttttagtagagatggggtttcaccacattggccaggctggtatcgaactccttacctaaggtgatccacccgccttggcctcccaaagtgctgggattacaggcgtgagccaccgcactgggcctctttcgttctttcttaatgaaaatcttcctgaaagatttgcctactgatgtctgtgtcaataggtactgcctgcgggacagagcctgccctccttttgaaggtctttctctgtctgggtgaccatctgcatgtcactccctgctgctcagaactaaagatgtagctatgcctggggtaggttgggaaaacctgtgggaatcacagagcttgctgtcatgctgtgttctggatacctgaagcttggcaggcaggtgggatcgagggtgggcattaggaaagtgatgtggctctataggaaggggacataggtcctgagattttaggtccccaattggacaaagctgttttttttttctggataaatgttctagcttattcataatcgagtggtcagttttcttttcttttcttttctttttttttttgagatggagtctcgctctttcgcccaggctggagtgcagtggcgctatctcggctcactgcaagctccgcctcccaggttcacgccattctcccgcctcagcctccggagtagctgggactacaggcgcctgccaccgcgtccggctaattttttgtatttttagtagagacagggtttcaccgtgttagccaggatggtctcgatctcttgacctcgtgatccgcccgcctcggcctcccaaagtgctgggattacaggcgtgagccaccgcgcccggccaagtggtcagttttctcagctgccgggtcttgcacaccttgctggctctggagaccatatgcaccatgtagaccccatttgtttcctaccctcagtgttgggggaggggccaagggcctgtcgatgtgttgacacctggccattcactggccttgaatgtccacattcacctccttgaaatcgatgccccgtatcggaggctccatgtggatttgggggcagaggcctgtactccagatggtggggtggccttcaccaatcaggcagattccctgccctgccctgccctttgggctctgtagctccagatgtgtgctcaagatctgtggccacatggatgggacaagccacagagactcagactccgtggtccctgtgaccagagtagccgtggccctgtctgggaatgttcccaccctgttgctgaaggtgagaaatttctctgtgctggagaacagctgtgctgagaagttggcccatctggcttgcaggactgctggggcaagggaggtctgctgccggtctcttccttcctcctctgactgggtgctccttgtctaggttccttgcagcaaaagaattctctaatttattttgttcccttattgagtctctactccatgaagcccacctcctaatcccagctgactggctcccacctcctcaagaggaaggccaggggcagacgaggctgaaggaggctgactcccctgtgccttcgcagtctgagctgatgctgctgtatgttcacagggctccttcagcttttaaaaaggcttcaacacgttcgtcacacgcttgtggctctcctggatgccacactaactcagtaaggcctgagttagaggctgttcctgaggctgtgaaaatagaagaagggtccagaggagaatcccttcatctgacgatcccaggaaggcttcctagaagaagcagcctctgagctgagacctgaagacagatcaggcctgagtcaggccagggagggtgtgaggggcccaccaggcagagggaacaggatagggcaggcacagaggtctggcacctggcttgtggggaagtgtgagcccctgggcatgaccaaggcggggagaagtggcgtgagaggaggcagatgtggctggcaggagatcggcggccccggccttgctgagctccactctgtatgcaccaggtgacagaggctgcccaggacggtgggcagggaagtgacaggtcacatggtcatcccaccaacagccgggagtccagcttggggggacccaagaccctggggaaggcacgagtcaggggcctgctagagccaggagctagtgggagaaggaaacagtgttgcttatgaattataaacagacactcccgcaactttctctgacgtgatacaatctcaaagtgggccacccagaggtgggaaggtgacttctggctctccaggccttgggcctgtcttttttttttttttttttttttttttgagatggagtctcactctgttgcccaggctggagtgcagtggtgtaatcttggctcactaccacctctgcctcctgcgttcaagcaatcctcctgcctcagcctcctgagtagctgggattacaggcacctgccaccacacccggctaatttttgtatttttagtagagatggtgtttcaccatgttggccaggctggtctcgaattcctgacctcaggtgatccgcccaccttggcctcccaaagtgctgggattacaggcatgagccactgtgcccagccgagcccatcttcaagttctccctggccctcagtgtttctgtattagttcacccttttggctccctgcttttaagagtctcccttaagactgtccccaagtggacaggtccccagaaccaaggagcagccttaggagtccccagttacagacactccagggggtccgtgtggccctcagcctctggcctggttccggcagccttggtcctttgtgctgtctctcacatagcctggccagagctggccaggtcccttggctgggccgagtcatcgtggccagtgactcatgcagggggagaaaagtgaggagggggaacagagtgcgagggggactgtgttaataacaaacccattaggtccctgaggtcacttcacaggagggacaaatggttcatttaggttgatctggctgccggctggcttccagagacactcagggtggggaagatttcattatctggggaaagcaataccagattgtctggaggggcccagccagcgcaccccgcgcttcctgtctgcctcccacgcagagcgttctgttcccaaggcggcaggccaagagcgcgagccgaggctcaggtgcaaagaggggtgcggcatgggggcactgcagggcacggggtgcatgcatttttatttatttttttactgagtgttagggtaatttgttaatggggtatatttggtgacataaaaccttctgtcgattcatggcagtctggaacggagtggaagcgtcccactcctggggaacccccacacacatttggctgtgaacgtcggtgcctttgcactggagcctctttggagtgtgctgggcagagcggagaggttcctcttctctcttctccatcatcctgtggaggtgtcaacatgtagccagagatggtcagtggcagtgaggagaggggggcaggaagagaccagggctgggggcttgccagcccacagttctacccctgaacacccatggcctccctgttcaggtcagcgaggctgggggcagagacgggcaggggtcccccaatgttgggcatctccccgctccctcatactctggatttgccctctggagaaagctctggagcacccagaagtcctggggctgctggctgaggtggggagcagagcccagctgtgcctggaggctccccacttccactcagcttccagggacagtctcagctgtgcaggcccaggccgctgaggctggctccagaaatttcttcacaaccaccactggatggaaaaccagttctctaaagggccccagagccagttttgtttcttcttccacaggttcccatagttagagcatcgggtctttgttagagatgcagaagagacgatgtccccagcccttatgtggttcggtctccactgtggatgttggtgatcttagtctccttctcaaaaccaagagggctgatgccccacattccaggcccccagaaagagccgccacccacccacaccgctacatcttctttccacttttctgttccggaaagagtagagtggatatgcgctcctgtagaaatccatctacagcctgactgcagatgtattttgctcccttattgagtctctgctccatgaagcctgccttgtttgtacctctttctctctctttctctctttcttccctctcttccttcccttccgttcccttcctttttctttccttcctgtcttattctttcctctttctttctttcctctctctctctttccccctttctctgtctttcctatcttttctttctctctctttcctcttttttgaacagccaaagatagaatgaatggcataggtaggtactgagctccctgtaactggaggtgttcaagtgtagggtggatgggcatttatagggcaggcattgaggaaggatctccctgggattgtggatggcaggacaggccctgtggagccttctgagcgggtgcagaagagggagggcatgttcctgctccctgcccttcccgggttgccaggccgccactcccaacctccaccctctttccttccacctgctgggccttacgggatgggcagaggcattgttagaacatggagccgcggtccacagagggccagcagggaggagagctccctggggaccacgtcgcctcagtcactgtggtgactttgaaaataaatgctttcttctctgcttgagtccctgttgttcctgctgacgtggaactagggcaggctggtgactcagccctcatccctgcactgcatcggtggcaagttgcctccagcctcagaccccacagagcagggtgccttcttcagaaaaacagtagggaggccaggacaccaagggccccagggacagcctgtttctcctggctggcatgagttctagccaagcctcctggtaccctgggggtgaggaggtaccagctgtgtgctttagtcactggctgctttgaggctgggtcggtgccaggctggccactccttcttgtcccctagtgtgactttgcagagctcccggaagggtcagagggtttttttccatcactggtgtccatgggatactgtgtccccatctcatttttgtactccagtctcagacgggtgctaggaagttggagactttagccatttcacgactgtgtcttgcggggctggagtaggaacaggagtaggaggaacgctctggtcatgggactgtgtgaagagagaaggatcaggaagaaaacatgagctatcatgtctgggttatacctcagcagagccgctggtggcctcccaggcatctgaatttactaatcacaaagctcaccaggtgtgcaaataaacaaatgctgttcaggaggcacagccagggttctgctggagagggatcatcttggaggggtcatactttccacccagtccttcagtccttctgtcctgtgtgtgtgcagcccctgaccaccaccatccctgcccctgccacttgctcccagggttccatcaggttggatgttattgcaataaaatgtagcaacagaaggtccaggcagtgctgcagtccctggtggtatcatcagagccagcaggcagcagggctggggaactccaagctgattcagtcccaagtgccggagcggggagctcggatgaggtgggggtggggaaccggggagccatggagcagagcatttgctgtgctgaaggccaggagcctccttgggagatcatgaatttagaacactaatactttgtttaaaaagtcccctgccttggagataagagctcaggccgctgtggtcaggttttgctgtaaatgttctgcacaaagcaggctggggggatcactgggaagtctggggaacagattggtcatgtgcttctttgagtgaaaccttatggttgcattgaagcggccaggcagagggtgtgatggggtgtggtagctgcacaccggctcagtcaggctgaatggggaaatgcaaactcaggtggcctgaaagagacttagtggtccacagcctggtggctgctcccagtacaggtgatgtaaagagagaaggggttccgggggcttggcccaggtggaaaccatgcactgtctgtgatcctgggcatgtcgaggctggagcaggtctgcttggtggctggcagaacgcacatgaagaatccatgtgtgttctgaacgtcccctctgcccctttgggctcatgccccatcaggagtctcccgactctgccattctgcaaaggaaactgcgctttgtcattgcacaggatcgaacaggtgtgtgtggagtccctaaagccactgtctcaaggggtctcatgggacaatgggagagttgctgtgatgtttaagactaaagtgatggctgggcgcagtggctcacgtctgtaatcccagcactttgggaggctgaggaggatggatcacttgaggccaggagttcgagactaccctggccaacacggtgaaaccccatctctactaaaaaaacaaaaattagccgggcatggtagcgggtgcctgtaatcccagctactcgggaggctgaggcaggagaattgctccgatctgggaggcggaggttgcagtgagccgagatcacgccactacactacagcccgggcgacagagtgagactgtctaaaataataataatgctaataataaataaaataataataataaaataataaaagcaaggacttgaacaaatatttgcacacccatgtttgtagcagctttactctcaattgctcaaatgtggaaggaatggatatacaaagtgtgtgtacacacagtggaatatcattcagccttcaaaaggaacggaattctgtcactacatgtgaaccttgaataatgaaccttgaagacctcatgctacgtaagcctgtctcacaaggacaaatattgtatgatttcacttatgtgaagtcaaattcatagagaaattggaatgacggttgccagcagctaggggaaggaaggatggggagttattgtttaatgaggacagagtttcagtttgggaagttggaagaagtttcggaggtggatggtgttgatgggtgtacaatgtgaatgtacttaatgtcactaacatggaaacttggttaaaatggtaaatttgtcttttttgtttttgttttttttttttttgagacggagtctcgctctgtcgcccaggctggagtgcactggcgtgatcttggctcactgtaacctccgcctcccaggttcaggcgattctcgtgcctcagcctcccagagagctgggattataggcgtttgccaccacgcccggctgatttttgtatttttagtagagacagggtttcaccatgttggccaggctggtcttgaactcctgacctcaggtgatccacccaccttggccttccaaagtgctgggattacaggcgtgagccatggtggctggccaaaaatggtaaattttatattacatatattttatcacagtaaaaatgcattgctctattagaaaaatgatagatttttacaatatgaattaaattacaagttatgaaggaaaaattaagcaaaacattaaaaaattacttataagtaattatatttaaaacaaaagataataaatacacaactttcatcacctcttaggttttttgcaacatttaactattgtctgtcctgttgcggttatgttcttgaggttgtatttgtatgatagaaacactatattcgtggtgactaaacatctcttctcagtctcacctccaatgatgtcatacagataacttgaaattggccggctgggcacgatggctcatgcctgtaatcccagcactttgggaggccaaggcaggcagatcatctgagttcaaaaccagcctggccagcagggtgaatcctcatctctagtaaaaatacaaaaattagccaggagtggtggcgggtgcctgtaatccgagctacttgggaggctgaggcaggagaatcacttgaacctgggaggtggagtttgcagtgagccaggattgccccactgcactccagaccgggtgacagagtgagaccctgtcaaaaaagaaaagaaaagaaagaaattggccaaggcaggaatattgacaccacaggaataggcaagcgctacaaatcgggaaactgagtgttgttgcttttgctggccccaggtggccggttgttgaccgttaactggcacactactggaggagggaggttcagactgattcgcagagagactagaggtagaaacgcaccatggtttggatgctgagggtgagggaaagagaggagtcaacagtggtgcccggagacttggcttgagcaactaggtggatggtagcaccgtttcctaagatgaggggctgtgggaacttgaggggctgtggaaggctctgccactgacggacccagggctcggcagctctgggaggcctactttgtgtcaggccacgcagagataagaccatctgggccctgcccttgggaagtctctgtctatgaggacacagcctgccacctaatggggtgtcccgtctggagcctcagtgttgctgggagaaagcccctcaccttccttcgctctccgagcctcttttgcttccctgccagctgagcctctccatggaggctgtgcctggaggggggtcatggatatggatgtgtgcgccaaacgctgcttcctcgtggatttcctccccactccgttcccacgctttgtaagcttcatttccccggggcctgacctgtggggtttctctccagacctgctccttcccatttccagaaaggcgtgcaggggtttcctatggctctcttccctgtccccatcccccttcccttgggacagtgatctgctggacgggtgggctacccacagggtttgtgattgcttagacatctttgctgtatgaagctttgacctcaaggcatgatgcagatgggaataaggcacgagtttctcctggctgctgtaacaactgtcgaaactgggtggcttatagcaaggggaatgtgtcctctcacagttctggaggccagaagtctgaaatcaaggtgccagcagggccagcttcctctgaagactccaggggaaaacctttctttgcctcttccagcttctggtggccccaggtgttccttggcctgtggctgcatcactccggtctctgcctctgtcttcacaaggcctttttctgtgtctctgtactttcttttctgtctcttagaaggacacagcattgaatttagggcccaccttatcttgagatccttgcctaaattctttctgcagagacccttaaacagaatcaggtcacatttgaggttccaagtgggcatatctttgttttgggggggatcaccggcccactgtaggtctcgttgtgcactgaagacgcaggcggtccctttggccaggcctgcagtcggtcttgccttcttttgtgaccgtggaagaatgcaccttgctggatgcacaggcctttatagttcttttgttcttgccaaatttcagctcagtttcctctctgctgccggcgtgcatcttctctgcccagtgccccttctgggactgtgtgtccaggccctgaggccctagaaaaggggggtggagggcctcctcactatcctgtagcaatgaggcctcattaaaatcctggagccccagactggacccagcccttagctatgatcaaaggacagctcgggatatgattaaagggctagagaaagatgatttaggctgagaaagaggaggccaaggagcaactggattgtccttgaatgtggaaaaggtaattatgacttgaagggtggtgcccagctgtttcccatctcctctgaggacaggaaaaaaaaggaaataaatgatgtacaattagagcagttggttagatacgagggtgaacttcctggctgggagtatggccaagccctgatttgggtttcctgaaagagctcggggaacctccttacctggaggtttctaggcctggtcatgtggctctgagtgattacattgaaggggcagtggctggggctggagccggtgggctctgagcacagtcacgaaggcatgcgcactttctggctgctctcctgccattgtcccttgggttcccattttggtgaggcgtgcaccctggcggcgctccccagggaactaaatatgtttgctgcactgtgcgtggagatggagaatgtacaattggctgaccctgtgctaatctggtggaactccatgccagccctgggaaagaacaattgcatgggtgtgtccacactcaccaggtgctttttagaaaaacactcgagaataatgctgtggcttaggatggctgttgtgccggacccggcatcttcccaggggggctgtgttgttgggctgagtttcttaggtactggacccccaaatccccaaatacggcgtggacaggtggcccagtaggggctggactatccgataggcccaggtgctggagttcagacaagacataccctggcctggcgtggaagatacggggtgctattaatggcagcaatggctgcatttctgaaacccgggctcccaggccgacgagggtgtgcacgcatctgaaatgtctgtggttttgcagttcccatgtccacaaactcacttggttgaaaatagttcaaaatatccaaagcatgagggagggagtgcctgcttttcttaaaaaggaaggacttgatttcatctacttaaaaagccacccaaacctagaacattttccgcaagagaccccctgccccccgcctctccagaatggctggagagtctcagcactcctgcacatttgggatatttcagagggggtggggaggggcaagtgggcagcgagcgacctcagacccaggatgagctgtcaggcgctccccggccacacattcaagggaccggagtgcagttgtagcgttgcggcctgctgcttcgggggtgggggtgttgttccatgctgtgaattctcacatggcccctgactctgggcagaggccgagggtctaagggacggggtgacagggagagcatgcaggagtgggtttctggctttccagggcgagtggaagaagcgcctctctctcttgtaggtgacagacctggggggcccttcttgaggatgagagcctgttgcttctcaagttctgtgtctaacccaggtccccaggtctaccccagcccctcggccctgcctgccttgtggatgatatagtttaagggtagagaccgctggcctggagggaaggctaggcctcaggttagggcccagaagggagggagaagcccttggggcagctccctttctgctcactcactgcctagctccttccttcacaccttccttcggaaacgtctgctcctgacaaggtctacttcctgctctcaggaggcccttattgtggaggaagggaggcgtcgcccgtccctggcttctctgacagccgtgttccatccccgccctgtgccccttctcccggacagtgccttctccagggctcacccaggagggtgcagcggtggcccccggggcggtggtcgtggtgggggtgttagctgcaggggtgccctcggtgggtgggagttggtggcctctcgctggtgccatgggactcgcatgttcgccctgcgcccctcggctcttgagcccacaggccgggatcctgcctgccagccgcgtgcgctgccgtttaacccttgcaggcgcagagcgcgcggcggcggtgacagagaactttgtttggctgcccaaatacagcctcctgcagaaggaccctgcgcccggggaaggggaggaatctcttcccctctgggcgcccgccctcctcgccatggcccggcctccacatccgcccacatctggccgcagcggggcgcccggggggaggggctgaggccgcgtctctcgccgtcccctgggcgcgggccaggcggggaggaggggggcgctccggtcgtgtgcccaggactgtcccccagcggccactcgggccccagccccccaggcctggccttgacaggcgggcggagcagccagtgcgagacagggaggccggtgcgggtgcgggaacctgatccgcccgggaggcgggggcggggcgggggcgcagcgcgcggggaggggccggcgcccgccttcctcccccattcattcagctgagccagggggcctaggggctcctccggcggctagctctgcactgcaggagcgcgggcgcggcgccccagccagcgcgcagggcccgggccccgccgggggcgcttcctcgccgctgccctccgcgcgacccgctgcccaccagccatcatgtcggaccccgcggtcaacgcgcagctggatgggatcatttcggacttcgaaggtgggtgctgggctggctgctgcggccgcggacgtgctggagaggaccctgcgggtgggcctggcgcgggacgggggtgcgctgaggggagacgggagtgcgctgaggggagacgggacccctaatccaggcgccctcccgctgagagcgccgcgcgcccccggccccgtgcccgcgccgcctacgtgggggaccctgttaggggcacccgcgtagaccctgcgcgccctcacaggaccctgtgctcgttctgcgcactgccgcctgggtttccttccttttattgttgtttgtgtttgccaagcgacagcgacctcctcgagggctcgcgaggctgcctcggaactctccaggacgcacagtttcactctgggaaatccatcggtcccctccctttggctctccccggcggctctcgggccccgcttggacccggcaacgggatagggaggtcgttcctcacctccgactgagtggacagccgcgtcctgctcgggtggacagccctcccctcccccacgccagtttcggggccgccaagttgtgcagcccgtgggccgggagcaccgaacggacacagcccaggtcgtggcagggtctagagtgggatgtcccatggcccccatccaggcctggggatatcctcatccgcctcccagaatcgggccgtgggggacagaaggggcctgcgtgcgggcagggagagtattttggctctctcctgtcttcggggtttacaaagtgtgttgggacttgcggggctgctctgtccaagcctgggtctggcgtccgcgtctctgagcctgtgagtgcgtgcgctttcctgcgtcctcttgactgccggtgctggggctctgcgtcctgcgtccgcgggagtaaatacagcaggcgaaggggaagctcacacaatggtctccagcgctctggggcagggcttctgaggggcgggcctgcctctgccgggacctggagcccccgcccctcggagaggctcctaggctgacttgggcagagccctctggtgggccgggagggggaaaggctgtgttgaaatgagcaaactgtccaggtgtcaggccaagctgggaggtgaccagcctgaggtcctccccgctccatggccagaaccagggctgacatctgggtgtcctgagcccagctgcccacacggcccacctggggtcagccctatctgagtgggggaggcggggcctcctgggggaccagaactttggctggacgccaagcagagtgccagtggctgttcttcagggctgggcctgaggagggtgtggggcggcgaagggacgggagggggttgtgatccagtggccactggcgctgtgcagagtgtgagctggaaacatcgtagttactttgtcagcttagtggtgaaagccctttttcaggctctatccctttgcatccctgcttcccagagggaggggaggtctgggtctgcagagctgggagggcttgctgttcccgcccccctcccccacaacacctcctcatctggacatctttgggcacatgctcatactggggtctccctaggtccactgtgttccgttgagcctcctgcagtccccgagtgaatgtgacctccctgcccctgcctctttgcaactcctccctgcgaccgctcctccaggggccttccttgtcccaaatgtccaagtggcacgacttagccggtctgaccactttccagtaagcccttatggagagaggccctgtgttgtgcagagctctcctcctgcctgcgggatcgaggtctctgctctcagttcctaacagaaagtgtcgggcccccagtgggatttctggggaagaactctcgtgtctcaacgggagccctgtggcgggaggggaggccagggtttggggttgtgttcgttgtacagctgtcaccatttgcactatgaaagttgttagtgccccttccttgggtctctgggtgtaactccacccttgcccccatgtgcctccatctggagctgcttctgcggctgtctcccaagccagttttgtgaccctgtaatttagtccaagacaatgggctcattgagaccatcctggtgcagcagttggcaatcctttggctctgggggaaggtttctcagtctcggggagtggggcctcaatctgctggttccctgtgtttatcagtctcccccttgtgtgtcctgaatggttttgctgggaattctggtcttagagccatcaggtggcccgagtcgataggcgtgagagagtgtgtgtgtgcatgagtgcgcatgtgcatgggggctgacctggggtatggaaaggtggccctccctggtgcccaaggagcctggagtatagttggagggtgtgggggtgtgtatatgggagttggacaaccttgggtggacagacagacgtggggaagggatgattgaaggaggtggaggagagagtgtgattcagcccagccaggggtgatgtggacaggcagcttccgaatcagggtagagaaaagtcaccactagctagcaggggagaagtcagtatggaggaggcggaccttgagggagagtaggaattggattgcaagaggaaggagagccttctggccagcagcagccagcagcagtgggggaggctggaatgagctggctggagagggggctggggcataaggaggggcctgcctgtgaagatcatatgggccaggctgcggagggccaggcatgcccgccgggagtgcagctggtccacgggaagcatctggagtggctgggaatgggcgcaggagcagcgccgtgggagcacaggtctctttcccggggcggctcacctggtgtcttggttcctgcaaggtaggccgaaagggtggggaggaaactgccagctccttacagcgctgggatggtggccccagggttcctgaggccagcggatgtgggtgcctgtcaccatgtgggttgctgaggggcggagactccaggggccaccccaaagcaggacgagctctgagccacggcatctctgggggcagttttccaatcgagcagacgtctaggcctggaatcctgtaacagaggccacagggccctgatcagggtgttctgggaggcttagaactagtggcagtatacagggtagacggcaagtgacctggcatggggaaagaggcaggtgcccaggccggcacagcacacccgtaaggaacaggtagacgggaagccgtccgtgggcctgtgtgtgtgctcggagttaaaattctgccaatgtcccatgtcctgggcacatctaccccctccctggggagcacctttctcttcaccttttccttccccgcctgtccccttcacccagggccttccccatccctcccgtcttggggaccgagggcaccatggctttatgttccatcaccgatgagttgcacagggattcagtccttccgctgttcaggccgggtccttcaggctcagggttcccaggaatggagagggtatcagtgtcttccatggactcaaacttcccgcatcccgcctttgctcccccttcaagataggtctccgagcttcaaggttttagggctctgtggaggccgccacgtagcagcaaggagaatgttttgtatttggctgatgagatttttagagtctcattttctacttttccactgtacaaacgggcctccaggcgactgcagcacccgccactgcccgtaatagggtgacaagagggatgaccctttcctctttctcccttctggttggtggaggcacggggctggcggacggcatgtgctttcgtgaattcaggccaaatctgttatcgcaaacacgattacaactcgggtctttgtgtaacaaaagcctttccaagtaccagctgttggcctgctttgctcagcggtgtttgctgtaaccagatttgcacaccgagaaagaatccaaaagtccttgatgtttgttgaaacaatctggcccaggacccacgtgctcagatcccagagctgtgtggcatctgagcttctcccgagcccccactgtcgcccgaggaggacccccagatctgtgttctggaggcagagcaggctgtgggacgggcttctgggtgggaaggaccatgtggatatgccttcttgtctgagagtcccaacacctccgggacgtgggagctggcgcgctggcaggattcaggtgcctctttcctctctagagaaaaaggccccgttgcttggtaataggtgcagacctgtccctaattaatgccagtaggcctcttgcgtgatgaaccctgcctttcagccaagactcaaggcatcctgtgaatactgcctctctgcagtttgagcttttgtggtgggaggcaggagccatggggagtgggggcaggcctcttacacgggtcccacagccactggcagcactgacttgatgctctttgagttcagagcccagggccagacagacccactgtcccgactacgagttggttcatttagaggggggcggacacagcacccaggcagcagatgcactgtgatcagccttgcagcggggctgtgggttctctgggctggatgtccgggaagaggcaggtggaggtaaacgccaggacacccctgcagtgactgggtgactgcaggctggaaatgctttctgtgggctgtggctgtccaggaaggttttgaatggggctagtggacagagtttgcatccagaggggcagtgctttggaggagtgaggggtatggcagtgtagggatgcccaggccgccctcactctgccattggaaagctgggcggcttcggtttcttcagtttcttcgcctgtttccctgcctgcaaagtggggttagaaacagctctctttgagggttgctgggggactctgagatgcagcccatggcgctgagcacgggtcctgcctcctacgggtgtggtgggtgtcgcggctggtgtggcatctgggcgggaaaagggggcatttgcaaaggacaggtaggtttggatgcttaaatatgcagatctggggatgggaggtctcaggcaagggcctgtgtgatgccactgtatgaatgaggccggacagcatggtcaccactaattatggaaagcacggcagacactagtgccagtagcgcccgcctgggggtccctctgagcccgacaggtactcaggctcccagtgcagccatgggaccccccttttcctgcctggctgacattctggaggctggcgtcatgttggctgcaggttcctcttactgggaggttgtcctggtcttccctgccaccatctacccccacccccaccctggagtgtcacagatgggtggaccatatgcccatctgcagggccaagcgctgacaatgaggtgagcacttgctggatgaccggaccatgaggacagcgggggcgctggcagcctgcgttcggctctgcaggctggcctttccctgaaaagcggttgtggcagagtgtgcatcccagggagtggtgcctgctgccctgaacattctcatccagcaggcctctgcaagggcccagtcaagtgtggtgcagagctgggctggcagctggaacagtctcatcttgtctagtggtgagaccaagggctgatgggccaaggctgcgtgctgcttgcccagcccgtggacccatccactgagcacccccatacccctacactgggcccggggtgtcaggaggtggaggggggactgggtgcctggaaaaacaagcccaccgagagcctgagcccccaggggtcagtatcaggcagtcaccacggtgcccggtacacagtggccacctggtctcgtcggctgtcttggtggtggagagcgtgcatggtggccgtacgtgatgggcatcacccagggtaatacagatatgcagactgtgcatttgtctgtaggagccagggacttctcagcctggcaacctgtgacctctgcctacccgttgggagagaggtgctgttccctgatagcctggtgccgggagagcagaactagggtctcctcctcctttctccacctcccatttcttacatgcccaggcatcaggggaggtcacactcagggatgagtcttggccactgggttcagggcctcactgttgccatctcttccctttgccagccagccaaatgcccgtccatcatcgtgccggggatggggctggcctgctcctctgaagtctccttggtgtatagcctaggctggagccccggacgattccgccaccccctcccccgactttttctttttattttgattcatcccagaaacccagccaaaaaccaagttcctgtgctctcccttgacaaagccactgaggaaaaatggtcaaacactgcctttctttccaaagccctcttggtttttcccaaatttggaggctctgagttgcttatgagaccaaagggtccggaactctctggaacacagtcccagaagtgggaggatttgtcatctctccagccaaacagacccaccagttggcccctagacacccccaggcgcctggggcatttctgggctcaggctgtttaatttggtctgcagagccccgaggctccgtttagactgggccagcagacagttctagagacttcaagtttgttgtcgtttttaaaagtcctgccaatgcccagaaacttagagggacaagaagatgacctcgatgtcagccgggaccataaacagtgaggcccgcccccccccccacccatgcctgcctccactgctcccgtagctgggtctccaggggattgcccgtggccatgggggaggccgggaatgcggggctcagactctactgggcttctcgtatttttttgtttttccttgtccatcttctttctcggaaatttctgaatatccccctacagcctttggcattctgtcactcctggcatctctgggccaactgggaaagccatcatttgtccaatatccagaaaatcaaggggcctggccttaaatacattgcagtgccctcctccccacatggcatcgaatttcctgtgtcctcaaagccaggagcctgtgccttggatgtgggcgatggagccttgcagacacctggagcggctttcctgggagagtctccctcgccttcccatccacccgcttcccctcccctgccccaagctctggtcacagcctcggaggggtcatctgagtgtaggttgcctccaggtgtacagttggaggggggcagttaccccacatccccctgtctgctaggggcacccccagggactcaggtcttgagggacagcggaagggtggggtggggagtaggccgttgtctcgtgccacctgggtgttatgtagactctgaatgggcagttcctgggagctggtttttccttctcaccccttctacagtgctgcccctctgaggggctggagctctctggagccctttgcagcctgtggcaggtctttctgattctgtgcctggtttcgcagcctccaacccatagccagtggcatgaagaacattcctggctgtctctacctgtggcctttgcaggcagcagttccctggggcagggcctgggggtcctggcacctccttgtgggaccccttgggtatgagggagggagccacctgggccacagatagacccccttcctgtatccaggaggttcaggatggacctgtctcatctttctttctggtgggaagagagcattcctggccatggggaatgtggcctggacagagccacctagcctctcccctcccccaggcagggccctgaaagatggagatggctctgctcctgccaggtcaacagccagcagtctggtggatttccatgcagtccaggcaggatctccttctgtccccaccccccaccccatgtgcaggaagctggttccaagcagggacccttggccccgctttccacgtgggtgggcagtttccctgcgaggggcaggccaggcccctgccctatgtcccccagagaccgatgttatctacagtaagagcatacaagtctttttggctccaaaccaggcctggaggggtggtcttctcctctgtcctctgcctcttgccccccattaaaggtcagggaatggagtgctctgtatgtttgctggggttgggttttttcctttggtttaaaatgaagggctggaatccctggtgcagactgcacggtgagaggtgctccttgggatccactcgaggagcattactgctgaatgccctgccaggccaggagcatcgctgggggtgggagaggcagttggcttatttgtttatccaacagccatccatgggtaccccaagggccagctctgttctaggcactgggggtctaggcatgggctcaggagaaggggtagaacgggagggcttcctggaggaaggcttcctaaccagagaccggggtaggagtttgccaggcaggtgatgctggccagcttctcttgccattttccttttctttttttctttttctttctttctttttttttgagacagagtttcgctcttgttgcccaggctgcagtgcagtggcgtgatctcggctcactgcatcctccgcctcctgggttcaagcgattctcctgcctcagcctcctgagtagctgagactccaggcacgcaccaccacgcccagctaattttttgtatttttagtagagacaaggtttcatcctgttggccaggctggtctcaaactccttacctcaggtgatccgcccaccttggcttcccaaagtgctgggattacaggtgtgagccactgcgctcggccttctcttgccatttctgcagactcatagtgtgtgtggaagactgtatgtctgtgcctggcacagctgccctcggcactcaggtgggaggtgggggagagggctgttggtgccagcacaggtcatggcatgagacaggctcccgcagccaagcggggtgcaccgcagcattggaggggccctgctgcgcacgagatccaggctctgcatctgtcctcctccccaggaggcctggagggctgggagggaccagggtggtgaaataacccaggtgggagagaggcactgttggagaggcagagggagctgcaggtttgtagcagcgagctttaaaccctgggcctccaccagaaaacctcagaaagggctgctttgcttttttttctaaactacaaaagaaacccttggccgcctgggccccttggggtcgggtgggggaggagatccttcattcgcacctttgcaggcccagtactgtgcagagggaggagggtggaggcaaaggcgagggaggagggtggaagcaaaggcggggtccctccctagccccgctgccctgcctggttgctgctctcagacccctactcctggcccggaaacatggaatcttgggacagctggggtagggggcacagaacggagaccctggtgagggaggaactctttctccagccctggctgtggccacagcaaggccaggctgggaggacctcactcaaatatttacatctctcctaatatttaaatgatgaagcaggctcctgcacacagctgccctggagccagctgttgcctgccctaccctccctctctccctccctctttctttccctccctctttctctccctccctccttctctccctccctccctcttgcattctttgtctctgacccaagtccaggcccttccagctgttctctccttacccacaggcacctcctgtgactgagcttctccttgttatttttcataaccatttcctttaattgagcacctcctaggtgccaggccctgggctggtactttgtatacaaggtgtcttttaatccccacgagagcccaacaaggtagattgggctgctgaggctccagcgctggaaggccggcccgggtcctcccagtccgcacctgcatccatccatcactcccccactgtggagacctgttccctggcccctggctgagcacgatggaaatctctgtctactagtccttggagagtggggatggctgagggtcccgaccctggggtctgacgggggctgcctctgccccacttcagcctggctgctcttccactcaatgactgagtttgcaaaaccagaataacagtgctacctggctggtactttgggtggctgggaggcgtgggagagggtgcacggaggggctgagcgaggtgtcagcatcgtggggatctccgagggtagccttcccaggcccagggcggagtgtaggcagagggcgcgatggcccagcgtgccggctcacatctggccttgcccttgcccacacggcaatgtgggggagtcatcagcctctcagtgcctcagtttcccatctgtgcaatggggacaagagtaaatcactgtcttcaggtatggtaagcactcatacacattgactattgcagaatgaacacagtgagcccttcttaggcttctactacatgccaggcagggtgccaggccctagtggagaggggacaatgatgggcaagctggctcctgccctcaagggctgtcgagcagggaggaaggcggcggctgccctgactgtgacccggagtggggtgattcgcaaagaggctggcgggaggctggctgggggctggctgggggctgctccctctcctgcctgtgttccgtggcagggtattaaactggcttttttcatggatttccgaggccctgactgtgggacctcgggcaggttttgggaccttgtgactttgttcccgcttgtcattcaggcctttgtcctcagcagtgcccagcacacggcgacttctgcatgtccttcagtgtgtgactgaccctggagctgagacttggcagctgaggctggacattgtccttggataactcccggggaggtgggggcagggtggggctgtgagctggcaactccgagtccctagcagcctccgaatggaggctttcctcttgtaggattctcggggaggaaggaggggatgggggagatgaggcttgtgagtcttcaggagggcagaggttcacacctgcagcgccccagaaacactccggggtgcccaggcttacccagccctcctgagccagaaccaccaagagttggggaccagcagtccattttttagcaagatccagaaatgattctcctgaacagtccgagccaagaatgacatatctggaatcagaacatcagaactacagaggaatcgagagaacgggcccaaaatgtgtagggacctcagccacatggcgccacatggaggaaagcacccaacatcatcactgtatgaacctgtttaaacacacacacacacacacacacacacacacacacacacacacacactccccagtaaagagtggaaagacatttgtcagaatattgatggaagttacctgggttgtgggtttatagattttttccctttgtttttgtgcattttgcaaattttcggctttgtgcctaaattccttttacagtcaggaacaaagcaatagatgttattttttaaagttcatgggctcgtgcccgtaatcccaacactctgggaggctgaggcaggaggattccttaagcccaggagtttgagaccagcctgggcaacatagggagacccccacctttttttttttttttttttgacagagtttcactgtgtcccaggctgaagtggcggtggcacgttcttggttcactgcaacctctgcctcccaggttcaggtgattctcatgcctcagcctcctgagtagctggattacagacactcatatttgtaggatttgagaatcctacaagaggaaagcctccattcggaggctgctggggacttggagttgccagctcacatattttttagtagagacagggtttcaccatgttgaccaggctggtctcaaactcctgtcctcaagtgatccatccatctcggcctcccaaggttccaggattacaggcgtgagccactgcgcccggccatgggagaccccctcttaaaacaagaataaaaataaaaataaataaaagtttactgtcaaaaagaaaaacacatcacccaacctaatctccccctaggattgagagatgaggaagcagaggccggaaagtgtcacattccctggtcgctggcagtcaggggacctgaggcctgggctggttttctcgtgctccaggcctggggtgtcaggtggagcccctgctttgcccaaaggtctaggtgcctctgccagcactgcttgcttctgcatttttggccacaaggaatgtgggccaaaggcagggtccttgacctctgcccaggagggtgaagtgggctggtcctccttgtccctgctccaaggcccctgcggctgtgcctttggaaactgctggcccgagctagtgtgcggagctgggacagacctcaccgtggccctcgtggggtcattccatgtccgggctggaagggatctttcggtccagcccttcctgttcctcatcaggaaactgagaccagagaggtcatctgcctggcccggggtggggtgtagatggcgcttgtgactcctgcatgccacgtgcagacagtccctcagctgtgggcttcccacgcaagcagccatgctggggataacttggctgaaacctgcgatttaatgaagagaagaatgactcctcctgcagccctgtgccccacaggctccctcctgcccccacccctcctgcagaggggcctcatgctggtgggtgggtccctgttgctgcaatgggcccaggcagtttctgggcagtggaggcttggctgtcttcctgcccaatgtcccctgtagcccacgctgtccgggaagggcggggaagcactcagccactggggacttcacaagatgggtatctgggagatgctgattggcaggccaggctcccgtggcccacaggcaggtcagaggtcacagtgctgagctgggctgagttggcagctcagggcagtgggggtgggggtaccttgctcagccatgggcctctctggcacaagggtttggagtttactgtaaacaactccttcagtttttccttctctcataggccaccagcagaattgaggggccctctgttgatgaggtgtggcctgggaggggctagttgtctgtccacctgatccttgcggacaggtgaccacaggcttcctgccccagggggctgggggaaagatcggggaggcctctctggcttccccacttggaaggaaaatacgggcataggggagacactttacagggacacatttcagccagtaccctctggctgtgctgggggcacagtgcctgccctgcccacaagaggggtcagttctctccaggatttaacttcagccttcagtgcagggcagatgagcactcagaggcccagaggactcatatcacgagagagaagctgtgaccacacaggcactgaaggttaagcagaagagtgggacacacgggtgacctgaaagtcccagggtcagtgtggttagccccagatagctggggagctttgggtaccaggcttagcaggggaggagggcccccgtgacagtttgctggggctgctgcaacaaagccccacgaactttgggggctgaagatggttctagaggccagaagtccaaaatcaaggtgtcgaccaggctgatcctttggggcctctgcgggaggctccggcccaggcctctctcccagcttctggtggctcccgggtgctcctgggcatgtagatgcgtcacgccactccctgctccgtcttcacatggccttttctctgtgtctctgtgtctcgtaaggatgcttgtcattgcatttagagcccaccctaaatccaggatactctcctcttgagatcctttattgcatctgcaaagaccctattccaactcctgtcacattcacaggtccgagggctagggctctggcatgtcttttgggggtcactattcagtccactgcggcagctgatcttaggggaagcagaatgttctaagcttggggtgagcggagggaacgctgctgggtggggagtgggagaccaggctcggagacaccgcggatctcctctgtctgatgagggcgtgatgaggttctcatctcaggtcctctgaatggcggctgcttctgaggagaccctttcccctggatctgcccctccagaaacctccacttaggtccaggtcccaaggtggatggtaagaggcggctgtccctgccacacttgatgggtgagtgtgtgaacggggctgggagcaggacacttgtcacttctgtggacagattccagaggctcatgaatctgctgctggggaaggtgcctgatctagcctgaccctccacccccacctcccccttcccgccccccttcaccagccctgttcccagagcttcacttccccaaaggcaggcgccgtttcctggacttctcagcagctaccccctaccccagacccctctcttgtaggcccctctggtctcagcgcctactcctccctgggcttctgcccctctaccgtgaggcttctgggcagaagtgtggggccccctcgctgtgtctggctctcgcggtataccaggggtcctcccaggggcccgccctgcccgctaggtttccagggagcttttcaagttcttagatgggcttgatggagtttcccaatgcgttgtctcagagcaggaggggccccggctgagtccgagagtcccctcagtcacaccctgggctgtttggggcagccaggcagcccgtcttctggaggtgctgcctctctctggttaccccttctggaatcttctgcgtccagttgcggcccctcctacacagcacacccaccacccccttttacctgtgactcttctttgtcaacctcttcatgtctttgagaatggagaccaggtcctcctcaccctggagttcagcagaacctaaaccaggcagatccgtgtaggttcacgtgggggctctgtggccactgtggctctgccgtcacctccagcccagcttggcgcgctttggatcatgtcattcagtgccggtcctccaaacctctcccctggctctgcaggtctgggaagcagctggctcctgggtgcagctgtgaccggagcctgaactctgctccctggggtcaccgtcccctgtaattaggctgcagctcatattggctcgggcagaggccatcggctgcccgccttggggccacaacacagagagccccgtgattaatggaggctccacctgggccaagtggcccctggtgttaggcgcttttttttttttttttttttttttgcattttttaagtgcttgtaacatttcccctaatggacaatgagacgaggagggagggaggggtggcttctctgcccaggcagatcaggaatggtcaccgcctgtgtgtgcagtgacaggtctgggaacagacaagggagagcttgtccgggaggctggaccctcacaccgatgctgcctgtgcctggcagctctgtcccgggcctcagaacagacactgaccaacacgctcctcagggtctccaggtccgggtcctggtccccggcagagcttcccatccatgggaagaagcaccgagcagccttgctggctcctcgcagggagctgggatgcatttctaagagcagcatgcgtgaagcccggggtctgggcaaaggagtgtttggggaagagtctgctgttgttggagggtcggaagtagaggggaaggaggggcacgcggtaggctgaggaggtggctggcgaccctgtggtggggacgagggggctatgagcagaccaggagccagcatcacgtttctctgtctccagaatcgaggacggagagctgccagagaggccctggcggggtgtctggggccacctaaagggcgtgggtggattaaagctgaggaaagcctcattttgggggactccgtacttaacctttgaggccctcagagctgcagcctgtggtttttcgaagtcaatcacctcccagggcctcgctcctgccttcagcgacagccatttatcagggagtctttgacccaaggagacctgaaaggtcatctggtccctctcctacccccaggcaggccacacctagaccctcccacacagatccgtcccacccttctgctgccttccaccagggacggagggtgggcggccctcccacccaggccctggcggccccaccccagccaggaaattcttcctctttatctgcctcacatctcttcccctgcggcttccgcccatttcccctcaatctgctcctagtggagcagccagcagctggtttagaacccgggggtggggggagcgctagaccagtgcagcacatctgagagtgtgccagaggtgctcccattcccatagctgatttagtaaagaaaagaggaagtccagcaacttagcgccactttaaagtccgcctggaatgaccctgtggctgccggaaccaggggcacgcggtagatgacgggagcaggcacagagaggccttcgtcccggatcagtcgctgttgccctcttggaggctgggctgcctttcaagaagaggacccaaggccctgtgagcggtggcctcctctggagcctttactgtggtcctggttctgctctgcgtaaagagagatggcttgaagcagaagctgctacgtggctgtcccaggcaggcgcccgtagtcccagctactcgggaggcggaggcaggagaatggcatgaacccgggaggcggagcttgcagtgagcagagatggcaccactgcaccgcagcctgggcgacagagcaagactccgtcttaaaaaaaaaaaaaaaaaaaaggagtagagaaatctttcccagaaggcctgcagtcacctccccttcatgtttcagaggtaaaaaaaaaaaaaactgcacatttcgctttttttttttttttttgagacggagtctcgctctgtcgcccaggctggagtgcagtggcgcgatctcggctcgctgcaagctccgcctcccgggttcacgccattctcctgcctcagcctcccgagtagctgggactacaggcgcccgccaccacgcccggctaattttttgtgtttttagtagagacggggtttcactgtgttagccaggatggtctcgatctcctgacctcgtgatctgcccgcctctgcctcccaaagtgctgggattacaggcgtgagccgccgcgcccggccacacgtttctgttcttgaacaggtggctccctgaccctgggtgtggttactccaagaccttgctctggtggggcacaattctggccccaggtagggcgaccgtataacttactgtcccttgggggacacgttagtgaaagggacccttgaatgactacggtgggacaacagatgtgagctgggtttgtcccaggaaggctggatgtatgggcctcttgagccagaggagacaacagcagaaagctctgcggctgatgggaccgagcaggagaagggccggcggaggctggggcaacaacgcacttgcccactgtgaagggcctgtgtgagctgatggctgatgagagggcagtggggcgaggctgcctcctgccaggctagaccagctccaggacacccatatctccttttcagaaccggtgactcagtggctagaaggggcttcagaattgacgggacactgagggagtcgaatggaatggctggagtggccacagcaggctctaggcctcctcccgtttcttttctgtgttctgttcctggggtctatatcctggggttgctgtaacagagtgccacaacctgggggcttacaaacatagcttccggcggctcctggagattcctggcgttccttggcctgcagacgcatcaccatcatctctgatctctggcccctgtctccacgtggctttctccccctgtctgtgtgtctttctccttttctgtcttttataaagatgctcaccattggatttagggcccactaaattcagaatgatctcaccttgagacccttaccttaattacatctgcaaagatccgttttccaaatgtgatcatgttcgcaggttccaggagttaggacttaagacatatcgttttgggggacactgttgaacccactacatttaataaacccagagttggtgccaatgtcccctgcggacaccatagcagattctggaggttccttgtaaaggaatccgtaggacttcttttcccttctggagggatgagactgtagctgggctggggaaagctgctggttcaagctggggctggttcagctggtgctggcttgccaggttgttagagagctttatccagggagaaattaacatcacaaagttgggggataagagaaggtttggaatcccaagggctggctgttgaggtcagctgcccacccctttgtgttccatcttacagggacccaggcctgccagtgctccgtttctggaaggaatgctgtgggctgctgtgccccataggcagggtggagggtccccttgcagccagcgagctgctcttcctgtagcgtgcagagggaaggaggaggcttgtttatttctcttggcctcagccgaaaatccaaccacaggctctggcactaggcagacctgctcattctcacatcatcattgcagagtgagccaggcctcttgggtggggctgtgatgagcaggaaggacctccggagtgcctgggacttcttgggcccagggttgccagaggcagagagaaagaagcctcctcctaacacttgagcaaagatagtcatcagaatccatcagagtggcctcctgtggctcttccctgggtgctgacccccctggtgcatttgaagttttcagggatactattgacgctccctgcacctccatccaggggttagtggaaatggttcttttcctccttgtccagaggtactgtggatgatgaccccaggtcccagacctcagtcattgggccacgtgtgcagataagcctgggcagtcagtaacctttggccaccaagctggcctcctgcggactgggccggcactggaggcgggtcttagctgctagcactgtggcccagccaggcctggccttgggaaggcagagggggaggggactgggaaagggattgagctgggggtggggtggtaccctggttcttccctcccagacctttggcaggtttgaactatctggctgcggctctctaaggagggagcgcctcctccgccttgatgtggactttgccttctgttcacgttgtccctgtccctaaacaaatgtggctctctgtggggagcctgggggccgccctccactgacactgctgtttcctggcttccctttgcaggctccgctcagcttcactgcgcctatttttaagcctttccttttggacggttttgcttcctgagaacacacccctccccatcaccccaactgtgtcctcctccctatccggagcctgctccacctgccccaggagccacctccctcctccaccaagcagcccaggccaattctggagggctaatttgtgtccctccagaagcaggtcctgagacagggatttcagtgggaggggacaccaggggatgcctgagtgtgggaatgggccaggcagggaatccagccaataaagggtgcctcaccagctcattgtgaccacaggtggctgcccagcccccataccgggcagcatggggagactgcagaccgtgcccccagccttgtcccacctggggttgggtaagggagctggggtttttatacttcagttcttggccaaggactgcactgctcactccttccagccttccgagggcttgggcactaggaaaggctctgggtggagacacggaaataggccatgtgaagtcagtgggcgtgattggtagcagtaaggccaggacagccttggtcaccagcaaggtgaccacacatttcagcatgcacagcccccacagacacacacccaggagatggtaattacaccagcaacagtcacccctgccgcgtgccatgcctgcacccagggaatcttattttttatttatttatttatttttatttgagatggagttgcgctcttgttgcccaggatagagtgcaatggcacaatctcggctcaccacaacctccgcctcctgggttcaagctattctgcctcagcctcccgagtagctgggattacaggcatgcaccaccacgcctgactatttttgtatttttagtagagatggggtttctccattttggtcaggctggtctcgaactcctgacctcaggtgatccacccacctcagcctcccaaagtgttaggattacaggcatgagccaccgcgcctggcctcaggggcaccttattaccccatcacctcctacagcaggtgacactgaggacactgaggctcagagtagactgtggttatgtcactctcctgtttggttctcctgctctcagccctgaaataaagagcacggtccctgtgcaggcccatacgtcctgtctccagccctggagcagtccttaagctccttgaaggcacaccaggcctttgggcctcgtcccccaagtcctggataaataggaggtgaaggagcctttgcaactggaccccactctgccagcgccaaggccctgcctgactacccaccccaccctacacagatcagggacctgtgccaaggtccagtgtcacaggagagtgaagacaaggaggtgcccatggcgtacatgctgctggactcactctgtagatcctaagggttatggggagttatctgccaggtgaggttttcccgtggctttttcctgcaggctcagggtagcatacagggaggtgcttccctactccttggcaccatctgtccggcttccctgagccctgaccctggctcctagatagccagtgtttcttcagggacagaacctgctttgctgctgctcagaggagacccagtttgaccagggctagcgttcctggaacctgagcctggaattccaccctgccctgggcagaggccacgttgctccctcctacgagagctgagctgcgcatgagattattctgaccttgggctctaccatttctttgcatgacatttgtcccaggctggagcagggctctgtggctcgcttggtgttccctccccagactgaggcctgatatgtacaccaggaagtgcttgatctggtttcaggagctgggagcggtttgccaggcagcctgtggtcagagcaggggccttaacaatggtcccttgtgcggcacattcctctctaaataggcccaggtccaggctgctcctgtttcgaccccgccatgggcctggaggggaaagtttgcatctggagggtggcccactgtggcctctttttgtgtagcagctgagaccgtaggtgcttgagaataggagaagccctgtgcccatcctgggctgtgagatgtttttccagaggtggggatggggatgggccagcatgcagttacccacaccctccagcttgttggcatcaaggtctgtgtatgtgtgtgtttttttttttttaattttgtttttccaacatggagtcttgccatttgcccaggctggtctcggactcctggctcaagcgatcctctagcctcaggttcccaaagtgctgggattataggtgtgagccaccatgcccagccagtaccaaggtgtgttttttaagagcaatattggccgggtgcagtggctcacgcctgtaatcgcagcactttgggaggccgaggcaggcggatcatgaggtcagcagattgagaccatcctggctaacacggtgaaatcgtgtctctactaaaaatacaaaaaaattagccagacgtggtggccgggcacctgtagtcccagctactcgggaggctgaggcaggagaatggcgtgaacctgggaggtggagcttgcggtgagccgagattgcgccactgcactccagtctgggcgacagagcgagactgtctcaaaaaaaaaaaaaaaaaagaacaatatcgatggttttattccctgaacatgctaagtgatccccatgtagtataagcatctcagaaggcaggaaaatgtaatgaacaacacccaccgccattcattccatccagagatcgttattttctgcccgggtgtgagtgtgtgtgtgcgtgcaaactgcacatgtgtgtatgaaatggaattaggatctttgtatacatcttgtgtcctgctatttttacttaatattctcggcatttctcatcttcaaaaatgtgattttaatgatggtgcaggcctttgacatatgggtttagaaaatctgcggaaacccggactgtttccaggttttgtcagtttaatgctgatgcaaatgtcctcgtacgtaaatctttctgtacttctgattatttccttgggataaattcccagaagtgggccaaagcacatgaacggtcttcaggcttttggagcaagttgagatcggtggggattggagaagggacccagggaggcttttgggagcttgcgagattggagtctggctttaggggacttgaattcacagatgaaggagatggctggcaaaggtgggaacctcctgctctatgggtgggggggtgacactgctttaccttccagtgacagcatggggatcctcccaacatgacctggctccgcatctttctgacactgtgcacggtccacagttgtgatgctcagctgggagcctcttctgtgtccttcagttgcattaactccttgcagacagaggaggaagctgtccggtgctcctccctgctgcgtgggtcctttgaatctgcccagttgggcctgtggatctgtgcagtcacgtacggggttctaaaatctgcaaaatgacaagctcacgaacactctcgcttctgtgggtgaatgtggataccccttggctgcgtctccctccacagggaagatggagacgtgtaaagtgacaaggacctgctacccctgggcaggttatgccggttccactgtgaggatggtggcagggggcttcccaggaggcctgcacattgggaagagaggggcgaccgtgtgtgactgcaggacccagggcgcagtcttaggactctgatgggggaggagatgctggggagccctgttctgccagcctggtgacagacatctcctaatgtttcccggctgggtacaactcacaatgtcctccgtggggaggcaattgcccatgaggcatccctggcagggatgatcttgtttcattgccacatatcccagcaatgaaacaagaatctagagtgatgtgattcctccgatgacttctccaaccatctggggtttttgtgcgactccaagaagggggaaggaggcagctctcgctcctctgggctcctgatgtggcagctctggaatggccacgtgtccgttggcccacagtgggccatttgtcgaatgtggttgtggtgggattggggctgggctggagagtgggtgaccacaccagctagcctcaccctgggccactgtgcagccaggggtttcatcttcccaggggtctcgttgtgagtgtcctggggctgctggaacaaattactggaaaccaagtggcccaacaaagattgattcgctcatggttctggaggccacaagtttgacatcaaggtattggcaggaccacactccctccgacagctcgaggggaggacccttccttgcctcctccagcttgcgttggcccaggcgctccttggctctggcagcatctgcagtctctgctctcatcacgtagccctccccaccgtgtctctttgtgtcccaagtccccttctgcctttctcctataaggacaccgagcactggatttagagcccatcccaaatccaggatagtctcatcccgggatccctaatcacatctgcaaagaccctttttccaaataaggtcacattcgtgggttcttggggttaggtattagacatgtctttttgggggtcactagtcaaccctctacagaacctcagacgaaagtgaatcttcacaggctgaaatgggggtgaaggtctagtgcgtccctcctccttgggagctccctcagggcttgtgcctatcctgtgatcctgtgatccagccttttttttgagatgaagtcttgctttgtcgcccaggctggagtactgtggcacgatctgggctcactgcaacctctgcctcccgaatttaagtgattcttctgcctcagccttccaagtagctgggattacaggcgcccacccccatgcctagctaattttttgtgtttttagtagagacagggttttaccatgttggccaggctggtttcgaactcctgacctcaggtgatccgcctgccttgggcctgccttggcctcccaaagtgctgggattacaggcatgagccaccacgcctggcatttagtaggttttggttgttttttttttttgagacagagtctcactctgtcatccaggctggagtgtagtggtgtgatcatggctcactgcagccttgatctcctggcctcaagtgatcctctcacctcagcctctcgagtagctgggattacaggcatatgccaccacccctggccaatttttgtattgtttagtggagtcggggctttgccatgttgcccaggtttgtcttgaactcctgggctcaagcgatctgtccaccttggcttcccaaagtgttggggttacaggcgtgagccaccacgcctggcttagtaggttttctagaagcgcctgaggcctggtgaaggcatggtgtcatggagtagagaacattcaactctgttcccggggagccggaacacacccctcgtagccaatctcaacagtcatgacgtggccaggatgacatggggagggggtggtgtggactgtgtgggaggccagctccccgggaagggggctggagtgggcttggctttgaggaggattcccaagaggaggaggaggcggtggcatgctcgtttggggggatggcgtgagccagggtgggcacctcttcatttaggtgtcaccttcttgacattccagccgggacatggtttccttggggaagatggacacccccagagtggggcatctcctggggaagatggacacctccggaatggggcgcctcctgttctcactgttcttctagcacacagttgtattctcttgcagttctggaggctgtgagatctcctggctgttatctagaacaaactcgcctttgagcagcgccgtcctgatggtggggtggcccctgcgggtggaacagcccctgctgtctcagagcttactgagagctagtgggcatgggagtggtgctggaccgaaacacccagagggatcatagagccaggcagtaagcacagaggccagctagtggggagggagggacccatccatgaaaagacaccaagcattgaaagagaggagaggatggttggggaccggcacacatgtgcattttgcgcagatggccaaggtggtgaggcgccagccacgcagacaactggaggaaggaggagtgccctaggggaggggccagctccggttctagaatgatccgcttgtgcacgtgggcctggctggaataaatcattgcatccgcaccgtagactcaatcgtaagctcacaccagggcagcctctgctttggtgcagtgtcttcgatcatgagttggccatggtgggggtgactccaaggggactcccaaggagggggttcaccggatctcccagggaaggtcatttgttttcttgggttggacctgggacaaggccttctcctgtctagtttctgttctccaacttgaccgcacggaaggatgctgaggacacctggaagccggcccctgctctacagcacccataggacagaggcacaccatgtggggacagtttggacagtgctcaggaggcagggagcagatcagaggaccgcgggaggccctgggaaccgcacgaggacccaggcattgagctctgcactttctggcatcagcccgatgtacagtctggctctgtgtctaccccgtacttcactttccccatctgtacgggggcggtaataatattctttacagcccaggtttaagcgggtgtagatgtgatgagcttggtaagcccatctcattacattcagttctgggcattgaaccctggactttctggctggtagaagtggacattcaacctttccttggggccctggggcttctgcagaatcagaacacagccagcagtttgcatgcagggtgcagagggacagagggacaccatgtcgggagcccacacctggcacacccctgactctggggctcagtgtcctgctgccctgcggccacgtgatcagctagaggtcatggctggacccataggcgaatacagcctgtggatttgattttgtttggccctgcggtgttttattttatttttagttttagtttgtggagacagagtctcgctctgtcagtcaggctgagtgcagtgacacgatctcagctctgcaacctctgcctcccgggttcaagcgattctcctgcctcagcctcctgagtagctgggactataggcgagtgtcaccatgcccagctaattttttatttttagtaaagatggggtttcaccacatcagccaggctgctcagtgttttaaaaagggcttgttttgctttgtgccagcatttaaagatcaggagatatcatataaagatccagatttctactctcttgagaagtgaacagctctggccacgccgggcccatatcctctagggcagtgacggagctgagacagggcctgtgacaactgagagttctctggagtccacacggctccttgcccagcttctggtggaggttgagcttagtgacccaggatttcgtctgtgtccaccaagaaggagaggtgcctgtggcttagagagggcgcccacaggagtgccttgcccaggaagctggcagctgaggcggccagggttagggggttgggcttcctcttcccctccccagtgcctgagtgcatttggaggaagagagacgggtgaggggaaggcactgaaattggtcctggagcgctattattgggggctggggaccagctgtcatcccttttcctgtgggcaggggaggcagtggtgggatcccatgagacccggactctgtggcctggtgaggcagggagcggctggggagacactgtgggtctccacaggggtgcgctgtgggtctggcctggggaaggagctggtgaatgtgcctgccatgtgggtccctccctgctctggccctgataaccaggagcggctggctctcatttggagtgcggttgtggggactgtggaggtggcagcttcccaggtaccatccccactgcctccgagggagcagaccctggtggagaggcaggatggctgcagggcgggagctggtggttggcatcactgcacgggcttgtagtagtggatgggaagatgcaggagaggctgatgactgagaaagttggttcctgtggactaagctgggggagccggacaaccaagtggttagaaccttgggctctggtatcagcctgatgtacagtctggctctgtgtctaccccgtgccccactttccccatctgtactgggggtactggtattctttacatcccagggttaagcggctgcagatgtgatgagctcggtaggcccggcgcctcgccggcactgaaagctccagtgtccgcccttagtgtcattgatggggttttgttcctgctgcggttctgattggttacagttgcggtcacttattattggaggcatgtcccccgctgtggctgatggtagaggtgtgtttgctggtggtgtcccagtgtgtgccttggctggaggtgaggagggataaaaacagccgcgacaagaaggaaatcaaggccgggcacggtggcgcacgcctgtaatcccagcactttgggaggccgaggcgggtggatcgcttgaggtcaggagtccgagaccagactgaccaacatggtgaaaccccatctctactaaaaatacaaaaattagccaggcatggtggcccgtgcctataatcccagctactggggaggctgaggtaggagaatcgcttgaacccgggaggtgccgctgcactccagccagggcaacagagcaagactccatctcaaaaaaaaaaagaaggaaataaaagtcttctctggaactagaacgttcctatgtagacgtagctggagggggaggctgtgtggtttgcgccgtggccatggcaagacacgacgggcagcatcttcccactccagcctgcatctctgccccagaactcatgatggttctcctaggatggggctgtcccttccgcttgctgagacatgaaggacgggaagagacccccggccctcaccgccgcatcgcctgccttcctctgctgctccttagcaggaaacatgccggagtgttccctagccatccattcaccaattgcatcccctctctttatttttcagccttgaaaagatcttttgaggtcgaggaggtcgagacacccaactccaccccaccccggagggtccagactcccctactccgagccactgtggccagctccacccagaaattccaggacctgggcgtgaagaactcagaaccctcggcccgccatgtggactccctaagccaacgctcccccaaggcgtccctgcggagggtggagctctcgggccccaaggcggccgagccggtgtcccggcgcactgagctgtccattgacatctcgtccaagcaggtggagaacgccggggccatcggcccgtcccggttcgggctcaagagggccgaggtgttgggccacaagacgccagaaccggcccctcggaggacggagatcaccatcgtcaaaccccaggagtcagcccaccggaggatggagccccctgcctccaaggtccccgaggtgcccactgcccctgccaccgacgcagcccccaagagggtggagatccagatgcccaagcctgctgaggcgcccaccgcccccagcccagcccagaccttggagaattcagagcctgcccctgtgtctcagctgcagagcaggctggagcccaagccccagccccctgtggctgaggctacaccccggagccaggagggtgagtcgcagagcgctaggtcttggatgctgtggtaatggggggcctggttgctggctttgccacagaatcttggaggaagaagctggatatggggtggagggtgctaccctggagacccagaaagaccggaatgcatgggggtgggggtctgcaagctcaggagaggtggctctctctgtctgatgggaacatgccaagatgccccaagcgggacttgaatgagagtttggaaagattttctgggtttcaaggagcctcctttatgggtcaccgtgggccttgctgggacctctgtctgctgtgtgtccctggagggcctgggaggcttagagaatgaggagccacgcaggaaccagggcaggctcatgcaggggtgtaggacagggtggagttgagacccctagaagggctgtcacattctggtggctcctgcttgaggaattgcaggctgcctggatatgcccagcagaggccgagggcttggggaagggaggagggacgtatgcctcctgaggcttgcattggagcccatggtctggtcctcctcccccaggagggatggttgtggcagagggaggggaacatgaggagcaccttagcctgcaggacaaaattctcagggcactgggaaggggtgcctggaccagggggctgtgtgatagctgcacacggttttatttgggggtgcccttctggcgagaggagagaggccatggggctccagcagcgtcctgggagggctcaagcccacagccgtgctgacatggagcttacaggcaggggattggtgccagtcctgtgggacacagggcctgtttggaaatgccaggctgtgggacatggttgggtcccttctcagaagcgtgccccctggccccagcagggatcgtggctccatggggctatagtaaggtgccagctgggttagaagcccctcaagagccaggtctgattctgggcacaggatcagaactcagtaatgctcagtaagccttctttaggttggacaaacagcacagtctgggtttttgatttagctgctgcttcttatttctaaccgtggtgaaatacacaacatacaatgtgcaattttagccactttgcagtgtacgtttcagcggcattcagtacattcacggtgttgcgcagctgccaccgctgtccatctccggtacccttttcatcctcccaaactgagctccgtccccgttagaccaagctccccatgcccctcccccagctgctggcagccaccattctattttctgtctttattatgaatttatttgaccactctaggaaccttgtgtgtgtggaaaaatacaataactgcccattttgtgtctggctcatttcactcagcatgacgtcctaaaggttcatccgtcgtgctgtagcatggggcagaatttccttcctttcagaggctgaataatattctgttgtgcgatgcacttgtgttgtgtagctgttcctccatcggtggacccttgggttgcttccacatctctctaagtccctctttccatcttctttgacttttctttgacttttttgagacagggtcttgctctgtcctccaggctggcgtgcagtggtgtgatcactgcttactgcaacctctgccccctgggctcaagtgattccccagcctcagcctcccaagtacctaggaccacaggttgcgcgccaccatgcctggctaatttttaaattttttttgtagagacaggttctcactaggttgcccaggctggtctcaaactcctgggttcaaatgagcctcctgcctcggcctcccaaagtgttgggattataggcatgagccacccaacccctttttggtttttctttttgaatgagagttctccagtggtcagtgggcttgggggctgggaggatgtggggcctggagagggtgtgggtttggggggagaccagtgctcctcatgctttcatgggcatgtggagtgcacatttgtcttggcgggtctggggcctgggactctgcatttcctacagagggggcatcggaacacactgagtagccagaggctagtgggccttggaaggtcctttccggccctcagtgtgcgagtcccgtgttccctctcccatctctctaagcttgactctgaagagccaccctgccccagccacccagactcagtgacagtggttgctggtggcatggtgtcaggccaaaggcatgggcagtttgcagagtggcaggaggctgtttcctcccctgccttctgttggtgcaggacctttgtttgacgtgccggatacacccccatcctgggttgatgtgttcacactcagctgagtcaaacaggatgtggctggggaggcggttgtcaccgagccatctaaatctcggtgatggctggtgctggatgcacagggacgtggtcctggctctgggggacaggtagggggatgtccatggggatgtacaagaacattctcctccaggggcagacacagtttagcccctaaattgtgccagagactgtgccgggagccaggcccagggacacaacctgcgggctctgctttctggagctcaccgagccgtgagcaggatggctgggacacaaggagtgtccagggagcttccccagcagtggaagtacaatttcatcaggccaggaaggggagagaaaggcaggccacgtggaggcagcagcgttcagagctgccaggaacctggcgctctggggggacggtggctttctccatggaataggatgtacacgttggagccggggcatgggagaaaaccatcagcatcccagacccggccacccacggacagggacctgtgcaggtgggagtccagctcacgtggagaggtccgtgggctgggctgacagtcctgagggcctaagcaagtccaggtggaggaaatgcagggacagacgagggcagggccttcccaatggaggagtgctcttgaaatccgatgggagtggcttctcggggggcccaggcctgagccccactagttcttcctccgaggcaccacctgcttgcttctccgtcctccctctctgtgtcacgaccgttctggacacggatccagttctctccaactcagcttcctgcccatctttccttcaggcccatccccttctgcccctccatgtggggctgggctgggagttccctgagccccgacatgcacagctctgaccaatctctgcggcccctctgtcccccgagcaccagggatccagctggcaccatggggaaaggaatcatggagggagttccgtgccctctgagcagacgcccagccccttggcttctgcctgcgggagggcatctgtgctgtggtttgtctccaccccagagctgtgggtgcagggcagggtctcctggggccccagctgaattgctcccagactgacttccccaaagcacagcactgctgagatctcttcccgtgctgagccttctctgctcactcaccataggcccctccacggttgattcactctcctgctcagctcacacctctctccttcccagcttctcctgctttggtcttcccttggtctctcacacctttcctcacaacccctttgccctgacctcctgaaccctgacctctgcttctctttacatcactgccttggtgaactcctatgcatccctcaaaacctggtccaaatacctcgtgtttggcttgggatataaatgatttgtgtataaactttctttcctctgctagacttttttttttaaatgtgaaagtagtttttcagatcataaaaagtaatcgagtaccctttctttaaaatgcaggaagtacagaaatgagaaagaacctaaaattcacctgtaagccagcgatatccatgcttgaggttttgctgtatagtcttcaaaattcctttcatgcccccactagattctgagggtagggctgttgtctttgtttttttttgtgttttttttttgttttttgttttttgagatggagtctctctctatcacccaggctggagtgcagtggcatgatctcagcttactgcaacctctgcctcccaggttcaagcgattcttctgcctcagcctcccgagtagctgggactataggcgtgggctaccacgcctggctaacttttgtatttttagtagagacggggtttcaccatataggccaggctggtctcgaactcctgacctcgtgacccacccacctcagcttccctgacctcccaaagtgctgggatcatgccaccgtgcccagcctgtcttggtttttataaagaatcccataaggggccaggtgcagtggctcatgcctgtaaatccagcactttggaggccgaagcaggcagattgcttgagcccaggagtttgggactagcctgggcaacatagagaaaccctatctttacaaaaaatacaaaaaattagccaggcatgatagcatgcgcttgtagtcccagctactggggaggttgaggtgggaggaccacctaagcatgggaggttgaggctgcggtgagctgagattgtgccactgcactccagcctaggagacagagtgagaccctgtctcaaaaaaaaaaaaaaaaaaaaaaaaaatcccataagataccaagtaagtgacttggacataataggtgtgccatgaaattatgctgaaggagtgagccactggtggtgagttgggatggcttttttgtggttcttgtaggcagatgtagtgacccccatgggtcgtccctagagaccaagcagaaactttcctggtcaactttacccccaggacacctggtctctcctctggaggttgtgctggagggctcagtgggtgggtgttggcttcagtgtgggggttctggaaggagtcagcatttcaggagggagtgtgggcacctagatggttgaaggggagggagaggaagagaggcgctgcagagggcagaggcatccctgcctgctcctccgccccagggcctggtgaggtctgagctttatgctggtggggtggattctcggtttccgaggctctggccctgcccctggacttggcaccctccttgctgtcctcccacagaagggcgctcatcctttggggtcatccctggtcctctcaggctctgggtggggacggccttgcctcctctcctggatccctgctcttttcctgccccccaacatgggtgcctctgggtggagtggggtggggctgggctgcagcacccagtactgagcctgcaagggctggctgctggctcagagccccccccaccagagttacccccctccggctcctcagccacaccagccaagtttctccagagctgccttataaggcgggtgctcagcgctcgttcatgggtctggttctctgccttcttgggatgctcactgggggcaagagggaggccaggcccagtgcccagctcagttctgggcatgtcccagctctgccccatgagtcaactggttctgaactatcattccacccctcccagcctcaatttcttgatctgtcaaagaggcatctgcagaggtggctgggggctgagctctcatgtatccacccaccccaagaaccaagaagggagtccacagtggttctggggccacttgtgaacatggatgtgaaattggggcggggtagacatggcagcatgtctcagtagttttcctgtgacccagagggtctggaaatctttgtcatgtgggtggagcgttgagggagcagggggtcaggcccccccgagctgatgatggtgggcgtggctcttcgcatacttggtccgcaccgggccgtgtgttccaggggcagaacagggaggaatctcagcacagacagcagggctgccagtacagcgttgagtatagggttaatcaaagcacagggctccctggaaccacccaacacagagcagtgaagaggtggctttggggaaagtggggtcagagctgagcctgagtggggggtggggagggcgggcatcagcctgcaagggagggacacctactgggccccagaagttcctggtggggatcagggactgtgaagttggggagagggtgaccactgtgatttagggaggaagggccccatagacagcccagcttctggccccgtgtttacaggacaccccacataggctctgagcctatccctggactgtggactccctgaggcagggtgtgcaggttcgtccagtaccaggtgtaaggcagggggccttggtaagcgtcgagggactcactggtgtctgatgaagcagtgagtttggatcgtgtcatgcctcgggtcctgagcctgcaggatttttctgtggggctgtgtgcttctgcttctggaggtgtccagaaggcactgacgttcctgccgggatgccttactcggaaggtcccgctgctcccacctcctcccattttcctgagctgcttgcagagggcacccaggtccccttttactttgggattgggtctctttctctttccccttctaagaacaagtaccctccttctccgaactgtccctggagcctctcagacctaggtctagagtgggaagtcccgcatgtgctgggggaacaggaatcaatgcgggaggattggccaggcccggtgtgtctccttcgtggtgggacggggtggggccagagaacagagcctggctccagagcccaggaagagaacccctcccctcgccggcctgccaagcaccgtgcagtggtgagaggaaaggagggctggtccgggaatgcagcgggtgccgagcagctgtggaataccttaaatagagcgcagctgcggggaagggtggggccaggaggcaggcgctgggggcggtttctctgctccgccccctgcagctctgtggccctgaccacccagcctggccccaggatggagccccggcccccagacacatggcactgggtgaggccgcctctcagcacttgtcccaggaagtcagagcagctgccagaagagagaggagctgtgtctgtacccgccgcctcccaggcccgggacagctgccgggattgagggtctgcacaatggcgagcctgtccggaggggcgcgccgcggccagacagccatgctctgtgcggtgtggacagagggcacattcagccctggaggagcgcactcagactccccgcctcggggcccaaagtgtgggcagcccctaaccagaccctggattccagcagacagcctgggaggatgccatgtggtccaccctgacacactgtctcacctgtgacctcatttctgagagctgcagggaggcgcttcctcagttggactccacttcctctccggggttttctgtgggtgttataagtgactctgtctccttcagtccaaggggggctcctggggtatgggctgtaactgacaggctagagtagcccatggccagggctgagcttccttcccgttctctctgaacactgggcccaggaaggggttaaagtggagatgctctgattaaagttgagggaggcatggagctcccctgaccctgtccccccatcccactgctgctactgggtgtactctgtggagccccaggactcttaaagaacccagagtggagattcccggtctcatccagtgcaggtgagggggaaagtgatttgtccacagttacatggctaccatcagcacacctgggtcaagctcgattccactccacggcccctgtctgaaacctggaactggaaatggccctggaaatcactgattccatctgccgccttccaaaatggcccgcagaggttaagatatagactcctgtaatgccttgcccactcgtgtgtggggaaatggcagaggagcaccggctttgccctcacactgcctgggctgccgcccctgccctgcctagtggctttcctctctggtccgttttctcattgtggaagtgggcacaattcttcctgtgcagcgtggttagagtggacagtgatgattcgtgaagcagggtggagcgcctgggggattcgtgttaaacaagcacataaacaaaagccaacacaacccttacttaatcagcaagcaggccttgtctgaagcccctgggcagcacctcatgccatccctaggttccaggccggtggtgtcgccccgtgtctctctcacccgcaagctggtgtttagaagccctgctctgtgttctggctcccattctccctgtgacctttccctttcttcatcctaaaaagcaatgcacgacggggcgtggtggcgggcacctgtagtcccagctgcttgggaggctgaggcaggagaatcacttgaacccaggaggcggaggttgcagtgagctgagattgtgccagtgcagtccagcctgggcaacagaacaagactcccatctgggaaaaaaaaaaaaaagcgatgcccagtcattcttagatagaaaatgaagatcacatgaaatttggaaagaagtttttctctcccattccccaactctctcccaaggggtggccatgttgacagctgggtgtggcattctcctgaattttattcctgcagagtcattcagggcttgtgtaaaaaaagtcaatgtgtaaatatagacttttcaagaacacaaaggaaatcagacttctgctaccagcttttattttttccatttaacaacactgttgccacttgtagatgtagcacgttcctttttctttttctttttttttttttttgacagagcgtggcccaggctggagtgcagtggtgcgatctcagctcactgtggctcactgtaacctccacctttcgccttccgctttcaagcgattctcctgcctcagcctcccaagtagctgaaatcacaggtgcttgccaccacacctggctaatttttgtatttttagtagagacggggtttcaccatgttggccaggctgctcttgaactcctgaccttgagatccgcccacctcggcctcccaaagtagcacgttccttttaatggttgtgtcatcagctgtcccatggccctgccaggcttgtccagcttcccactgtgattgagaggctgcaacagatgttctcgcacttgtacatgtgcacacatgactgaaggatgagctcttagtgaatttctgtgtcaaggatgtgtgcatttaagttttgatctgctgggcacagtggctcacacctgtaatcccagcactttgggaggccaaggcgggctgatcacttgaggtcaggagttcaagaccagcctggccaacatggtgaaaccccatctctactaaaaatacaaaaattagctgggcatggtggcttgtgcctgtagtcccagttactcaggaggctaaggcaggagacttgcttgaacccagcaggcagaggttgcagtgagccaagatcgtgccattgcactccagcctgggtgacagagcgagactccctatcaaaaaaaaaaaaaaaaaaaaaaaattgatccttgttcctgaattggcctctaaagtggttactagaattttttaggacccctcccctcgtcgacctgctcagctgtctgctgggccctgtgcagtgatggtccagcagggaggtcctatgccccttacccctggctgagggccaaatgctctccaattggtgttttattttgtgcatctcggtcaagcgagagggattatctcttcgtatgttataggccagggccctgtgttctcttttcatttggaaggtgtatccttttcttgttgaaattttttaaaaagagttctttgtaagccaggcgtgatggctaacacctataatcccagcactttgggaggctgaagtgggcggattgcttgagcttaggagttcgagaccagcctaggcaacatggcaaaaccgcatctctgcaaaaattagctgggtgaggtggtgcgcctgtagtcccggctactcgggaggctgatgtgggaggatcatttgagtctgggagtttgaggctgctgtgagctgtggtcataccactgcactccagcctgggtgacagagtgagatcctgtctaaaaaaaaaaaagagttatttgtacatctttatcacagcaggtacgagtatcttgtccccagctgcctacttttgattttgtttctgggatgttcttctacacagaacattttaatcctgatattgtcaagtctctgctttcccttttagcttttggaattcacatcctgtttagaggtctcctgcgttctgaaattataggaaagaatttcacccacgttttcttctagtacttctgtggtttcatttttacatgttgaaatcatgaatccattggaatgtattttggtttcagcagcgaggtaggggtagatggtattgcttggatacacagcagcgagcttggtctggagcgggtggggcgtgtgtgtgtgtgtgtgtgtgtgtgtgtgtgtgtgctatttttatcagttttggtgtctgcattgtgctggcttagcaaaaacaatttggatgcatttcttttaccctctgccttctggaacattttaagcagcaacataataatctctctgttaaaacttttcaagaattcactcgtgaaaccatctgagcctgatacttttgggggagtctagcactttaaaaacttaaactttttccatgggtctgtgagtttgggagtttttctttcttcttaaaattcattactatttttttcctagaaaagtgtcttttagcttatttaaaatccgtcagcttattccgagggggttgctttagctcgcttagtgaggacagtgtgcagcgcggtgattgacatgattgatcagcagagcacgatcgatcagtcggtgtgcaaacatgactgactgtggccagcgtcctgggatgctccatgttgaggcacatgtgtgcagtgcagggtgatgtgtattctgagaggggatgaagccacaggacccctgcacccttaggagagagcccccctccccaaggctgcagtcttgagtaggtagtgacgggactgggtctagggggctgagtggtcccagcaggccaagggcttcaggaattatgagaagtttggagttgcccagagagcagctttcaaaaccagtctggactgcagcctccagaaagacatgcgattgacaccacgaaccaggacacacctatatatggggtgggggtggggatgggatgtattaatgaaaccaaatttccgtgatggaattcttacctttaccatgcgtgtgctacactcagtattttctttttttttttttttttcccctctctctttttttctttttgtttgtttgttttggagagagggaaggctttttttcatttttttttaaacagctttattgagatccaagtaagctactatacaatccaccaatttatttatttatttatttttttgagacggagtttcactcttgtcgcctaggctggagtgcagtggcgccatctcggctgactgcaacctccgcctcctgggttcaaccaattctcctgcctcagcctcccgagtagctgagattacagacatgtaccactacgcccggctaattttgtatttttagtagagacggggtttctccatgttgaggctggtctcgaactcctgacctcaggtgatccacccgcctcagcctcccaaagtgctgggattacaggcatgagtcaccgcgtggcccaatccacccatttaaagtgcataattccatggttttcagtctattcagagagtagtgcaaccatcgtcaccacaaccaattttagaaaattgaaaatttgagaaatttagaaaatttttttcttaagaagaaaccccgtagcctttagctatcaatcctgccctcctcctccatatttccttcctatctgtgtggattctttttttttttttttttttttttgagatagggtctcactctgtcacccaggctggggtgcaatggctcaatctctgctcactgcaacctccacctcccaggctcaagccatcctcccaccatggcctcccgagtagctgagactacaggcctgtgccaccatgcccggctaatttttgtattttttgtagagatggggtttcaccatgttgcccaggctggtcttgaactcctgggctcaaatgatcctcctgccttggcctcccaaagttctggaattacaggcgtgagctactgcgcctggccgattctagacatttcttgtacagagaattgcacgtttggcctttgtgtctggcttctccacttggtgtcatgtttccaaggtccatccacattgtggcaggtgccagtgcgtccctgagtaatattccaccatggcatggaccattccattgtggacagacatgttgccttcatcagctgagggacattgggttgctgccaccgctggtgagtgtattcttttcaaattaaaaaaaaaatgctggtcaccacccactagatcgttttcttggcccacagggtgggacaagccggcctgggtgagggccaggaggtggccaggtggaggcggctggagcggccctgggttgcctctgggcgcagcaggcagaggtgcaatggcagagtctgagcaggttccctgggcggatctccatgccggtaatgtttgtttattcaagaagtctcggccaggcgtggtgcctcacacctgtaatcccagcactttgggaagttgaggcaggcagatcacctgaggtcaggagttcgagaccagcctggccaacatggcaaaaccccgtctctactaaaaatataaaaattagctgggtgtggtggcgtgtacctgtagtcccagctactcggtaggctgaggcaggagaatctgcttgattccaggaggcagagcttgaacctaggaggtggaggttgcagtgagccaaaattgcgccactgcactccagcctgggtgacagagtgagactatgtctcaaaaaaaaaaaaaaaaagaaaaaaaaagaaatctccagtgctgccctgtgcccggcaccgaagccgagggaaggcagcattagtatgagctcccagcccaccgggctcctgtctggagctgacgtgcgaccaaggcacacgagggaagcatggcgaggtggacggtgcggaggcataaggagcaaaataaggcagatgcagtggctcagtggctcctggtggctgcgaggagcgtgggcaggacagccccaggagggcacctggagagcagggccggctggggcaaggtgtgtcaggcacttgtcaggagcaaaatgtaaggggacaccaaagagctcaggaatcaacacagatagtatttaatgcagtatttttcaatatcgaaatgatgcatagtaatctctatgatgaacaaatgttggaattttaaattaagacaggcccagccctgcacgtgcacagccctgtcagagtttgttcagcgtggaatttgatttgtttaaaatgttgcttcaaaatattgtttgattcctggattttttggcactgccttaacttttgcacctggacgaaggcctcaccctaatcccagctggagagggtcaagggctggtgaatttggctttggacctgcagagcttgtggtacctgagaggtggggccaggaacaggaaggagctggtgagaacggcacccggtatgggatggggccagatcagagcagcactgtggctctttccaacccgtggttttgctgctggatgcttggcgttggtgctgagcccccggccctctgaacggagtgtgatgaataacggggccggggagctcttgggcccctccctgaagcagcagtgaagccagggacatgccggcagcaggcagggagagggacgtctggtctgtgcctggagccagctgccccatggaggagctgggtgaggatgcggtgggaggaagaccttcccagtcctgcatcctccgaagcataactgagtgcttgtgtggcttgggggtcactctggtccgaggacagtcttgctttgcttagccaggctttgaagagccaccgggatacggacagcagccctgctgggtggcaggttgtccaccctcgcccactcaacgctggaactggatgcagagcacctggatggccagtcccagagtgtctctgacactcccagtcacctcatcccttagaccaggataagatgcgggatcccaacctcgagcctcccatgggctccattccatgtgctcccataagccactgggcccacctcctggctccagggctgtctggccatttggcatcttggtttcctcatctgtacaatgaaaataatagtcccagccttctcgaggagttacaagatgcctttcgtgtgaaaaactgggatttggtaccagactatctggatttgaattttggccctacccctcctaacctgtggctttgggccaatctggcctccctgtcctcagtttccccatttatagagccatctcattgagttgctgggaggatgaacataaggaagtgtactcatgtgcccagagcattgtgattttacttattattaccaaacgaggcacacaataagtgcctaatagatgctcagtgtcatttcacggattctgtgtgccttgtgtgtctccagcagccaagctctggaggtggggaagctgttgacgagttgcacgaggtaattagaaagaggaggccacaggtgcaagggtttgggtgacacctgtggacagagagaggccgatggaccctggcagaggggaagggggcccttgcacatagaaaatgtttcctgcatccaagatccttgtgactctggaacagaggcagcagaggtctgcaaattccaaatcataaacccagaaagcatagaacattcgtagagaggaccagaaacatcatatatcttagtgtgtatagaattttccacatagccaaacaaaagcacgtttctaactgaagctgttggagagttcctgaggactttataccagacaagggccggtaagtggaagttcaatacgcaggagccattccttttgttcacaaatgtttgccgtcttttctgtctatatccgcattcatgtgagggcactcataggtccaccgtccagccccatgctttgtttgctaccaaaaaatttcttaagaattcctcagctgcaaatcctcctaccggagggggggttccaggaacccagccttgctcggggttggggcacctcagcacctgctgcacaggcgttggtcattaaaggtcatgtgccgtatccgtgggccctcggggtctggtggcacctgggcacacagtccagtggcggcctcctacctgccagacactgggagtggggggctcctcattcctgttccctggcggtggggggagtgccccgagctgtcacacatcagaacccaccgactcacacgttgcggcaccttacagccccttgacagcctctcagcctgagagaccatcaaactgagttcctggagagggtggctgttgaggcctggacacaggtgtggacaggatagccctgcctcatctcggagtcccgctccggttcagcctcttgtgggtctgaagctcaggctgggccagtccctgcccctcagatggccggaaaggcagcccagccccacggcctccttgtcaggctctgagagccgcctggcctccagctctgctctttttttttcttaagatggagttttactctgttgcccaggctggagtgcagtggtgccatcttggctcactgcaatctccacctcctgggttcaagcaattctcctgcctcagcctcctgagtagctgggactacaggcgcgtgtcaccatggcaggctagtttttgtatttttagcagggaccggttttcaccatgttggccaggctggtcttgaactcctgacctcaagtgatctgcccacctcggcttcccaaagtgctgggattacaggtgtgagccgccacgcccagcctccagctctgccttgattttctcttaaggccgtgaggatgtccacgcctcctcctttcctcacggcccattgatgtctccagatgctctgcaaagccaccctcccctcgggagctccccagctggtgacgggggaccttttggggatcactgcccaggtagtcatgtaggtctgtgggccgtgcttccaggctggaccgagacccggtgcatggggtgcttctggtctgagctgaggcccctggaagccacagccaggaggcagcaagggacggctgtcatgtcccctctcccctgtctcccagggtccctgcgggacagatttccctgcctgagcctcctggttgcccataccctggcctcccaaagcccagcctgaagccttaggcaccctacaacctgcttcctctagcagcctgccctgtctcttctctgccgatgttcctgaaactttcctgcctctccttacctcttggccagagagagactggagaccctgtgggaacccccgaggggagggagaaggccgctgtttgaacggaggtggtctttccctctgcccctccccaggcgggtcacacttgcaggcccagcctcctgctgtggcagcgcttggggtgtcggctgcctcctgggcacgagttgggagctgagggaggcgctttcaggaccggagtggcaacccagctggaggaggagtaacaggcccgtggtcagcagcagccgccgcagggaccccggcgctgtacctgtgccccagctgacccctcccgcttccctagggtgggccggggatggtggtctgttgcccagcccaggaagaagaggggccgtaatcagcagcagccacctcaggggaccccagcgctgtacctgcgacccagctgacccctcccccttccccagggctggctgggaatggtggtctgttgcccagcctaggaggaagaggggctgtggcttccactctagaggtctctctcccggtccctcccccggtgctggtctaactgcaggcctgccttaggccgtgccggcacctgctgactgacgcttagcggatgctgataggagagggctgggatggggaagcagcaagtcccggtcactgtgggctcgggttacagatggttgaggcacctcctggccatccccaggaagcaaggccccacgcagcctccgactcacccactgcccgtgtgtatttcaggaggctgcatcccccaaggcccccaccaggtaacttcattgggctgggtgtcgctgcaaaaccacccattgggtgcggtggtcttctggtggggggcatggctggggaggatgcggtggaggagaagccagctccgtggttggggggagggcggactatccgtttcctgtctgtcccctgaactggagctcatggtccctcccccaggtgcctgggccatggaagaggtcacagccctgccttattcctgtggcagcctaggggagccctggccagtcccgtgtctcctgggagggcgacagcctggtcaggctgcagggcaggactggaatgcagacccctgcttggccatgctgttgcctggctgctctgtctggggaccttctgttcaggaagagagaagcgggccggacagcccggctcagtgattggaagctcagctccccatgttcagtccagcaggaagtttgcctcctcggaacacttgcgtgcttctgcatgtgtcttcttggctggtggttctgcgaggcccctactgggctgcgtcatgtcctctggccaccctggccttggtgcctggcccctgtgaaacagagatacctgggcagtcccccacttgtgcttgcaagcctgtgtggcttcagtgatggctgattctgctccacccagaggacctgggaatcctcagcccaactgtccagaggagtctttctcagtggggagagcctgagctgtcctcctggtggacagtcctttagatctcaggcggacttccctgccggccgttcctcctgctgcccctgctcctctgtcccccatctgtctcccaccctctcccctgcagcagccagctggcacggggacctccccttccctctgggattgtgaatgagacgactttcctggtccttctgggtctagatctttctggcaacagtcagtgaaacccttgtctcaggtgggaggagaaggctcagtatgtggtcacaacaacggtcctaaccacatcactctcaaacgctggctttcacttaccccttgccctgcccaacagttactttcatcatcccattttccagattaggaaatcaaggcgcagagagcttcagccacttgcctgaggcccccacagttaagtgtctggatttgaaccctggagcagcctggctgctgagctgtcctggagacggggtactgtgcagtggtcggggtaggggtggagctctgccgtcgctgactcccgggctacctggagtgataacacagcccagtgtctgggcccctgcctgagactttggctggatgccaggagcccgagaccttccagctctttcctgtgtaaggcgccatggggtgaaatgaaagaaaaccccagttagaaggtgtccccctcttccttcagtccctcagctgccctggattttgaaataagacaccgcccgtctgtggggtgagcaggaacagattggaaccgcatttctctccccccagtcacagctgccaggagctcatctttctctgtctcctccccctgccgcctctccccacaagactgggctggatgctgctgggaaagtcaacaggaagtcttttggctgcggtggaggtgggggtctgtgcttccctggggaccgagatgagggctccaggttggctccggcaagagcagggaggctcacgtctctgcctgctggttttgcttcctgtcctgggagaaggtatccacatgtcccagaatgcaccctctgcgtgtacagggatggcttttgggccattcacctgaggtttattgatctttctctttggaactggagtggctcctccacggtggattgggctgagctctctgcctcggccgacgtctttccccaggcacttcctctcaccgtgccagggtgcaggttgctagtggatgggtcttcaccctcggggattggcagctgccacgctcatttcacagtcgagacaccctggccgaaggttctgctaagctccatggagtgtagggattttttttgagacggtctctctctgtcgcccaggctggagttcaatggcccaatgtcccgctcactgtgatctcgacctcctaggctcagcagtcctcccatctcagcctaccaagtagctgggactacaggtgtgtgccaccatgcctggttaattttttaattttaatttttttttgtagaaatggagtcttactatatttcccaggctgaactccaactcctgggcttaaatgatcctcctgccttggcctgccaaagtgctgggattccaggcatgagccattgtgctcagctggggttttcctttaacccttcctggcccttcccaggtgcaggacccgggcctcagccttatgtgttcttgaacagctctgggctctgtcctgtacctcctgggcgcgtggtcaggcctctcgtgacatcagcaggagactcaggtgaagaagcaggcagaacggaatgcttgctcacccagcctcggggccaggcggggcggccaggacagtagcagtggctggtgtggcttcctgggaggtcagcccattggcgtggccagcgaatggggaggggagcttctccccttgtctcccctcatttctggtctctgggcctccagggccaggtctccagagttctaggtggaggatggaggtcagggaagctggggtaagagcgggctgggggtgggtggtcaggcggatcctggaaaaccatcctctgcaggtcccgctttccccagggagcactcagggctggtcccggggagccgggctaatggtcacctcggatggtgcaggggtccatccccatgaaaccgggcccatccccatgaaactgggcccacagaagcttttggttccggttctgttctgccccctggctcttgcttccaaagtaggactcaggatagctctgaattccctgccgaaatgcagcttcctgggccctaacccagccctccagaaccagagtctctggggtgggccctctgcttgtctagcagcctccaggggacacttgtgcctgccagagcaagtctaataagcactgctgtaaacccctcgtccccacagccttctggttcgtctcccttttcctgctgggatctgcatcaggattaaatgccaacatcagggatcaggttatacttgtgaaccctgagacaatacctgcatctttttttttcttgaggctgtcttgctcgctctgtcatccaggctgaagtacaatggtgtgatatccactcatggcaacctccacctccagggttcaagcaattctcctgtctcagcctcctgagtagctgggactacaggctcacaccaccacacctggctaatttttgtatttttagtagagatggagtttcaccatgttggccaggctggtctcgaactcctggcctcaagcgatccgcccgcctcagcctcccaaagtgctgggactacaggcgtgagccactgcgcccggcctgatacctatatcttgaccaagctgctgtggaaacattgagttccccttgatagttttgtccacagagtgaatgtttaggaaccggcgaggcatctctcacccccacccagatggcggcctggaggcagcgtttctgaccctgtgatgggatttgtctctcttgtccaagagactttagagatgtggcccctgaatgtgggggcccctgttggggtgggaacgggagctggccctggccattgtccagtgaccccatctcagtgcctcgatcctagcaccctcgatctcagcgcctccccttccccggctccgcgcggagatcacgtggcttgcgctgagcaatcctccactgcccccgtcgcgttcctgctgcagggaagcctttccagggagccagctgacacatttggcctccattatttgtttttgaacaggaatgaaaggagagagtgagtaagaaagtggcaggaggtgggggttgcagagtaggggaaggtcagagagaggggaggaaagatctggaaagtccaggcatgtgctctggaagcaggtgccagcgatgagctcatctggagggtggccgcccgccctgagccctgcctggggccagcagggaacactctgccagggcatgtcgctgggagcctgtccttggctcactttctgctgctttgagcgctgagcagatttgtttccattttagggacaacgcaaggaggctgtcattccacccctcaccttattaatatttcatgaatcataagtgaccacttactgcgtcctgacgtactccaggcgctgggctcgaagctttatgcgcttcatgggatgtatctgcactatcgccgtagaaaacggttcctgttactactgcagagaaggcaccgaggcacagagaggttgaggaactggcctcaggccacacagctagaagcggctgaccctggctgtgaacacagggctgcttgactccaaagcctgagctggtttgcagcgaggctcatggtttctgtgccactgtttgagcctctggtcgagccccttggctcagtggggggcccagtgacctaccagctgttccattatatgttgtggacacctccacggcccacctgggtgggagggaaggggcttcaggaggtgggaggggtacagggaacacagtccagcctgcttgggcccaataccttgaccttcaaggtaccccttgagggtagcatgaggctaagctcttgttctcctccaggactctgttcctgtgagggcctcggggtcccttgcttttttctgggggccttgctggtcaggatcacagagaagctctttgctgttgatctttctgcctctgtatcttttggcaagccattttatgactcagttgctttgtctgtaaaatgggttgaataacattgtcctgcctcggagggtttttgggaggatcaaatgagacctgttgcacagaagccctttgtaagccatgctgactggcggtcgccgggcccccaagtgaatgggcatccgggcactgagtgtgtggactcagtactcggaaggaggggctggggggtacctagaactcctgggaggcttggacccctgctctgctcagattctgagcttctccttggccagtttaattcccatcagtagggtgagggtaaccaggacttacgcatagttgggcgaagtcgagtgaccacatgtggaagtctagcgtccttcatgcaaagtgggcaggcggccaaagtgagctctgctccagtccccccacccccggggctgttcctggcgccctgccctcccccagagccccactgacctgcaccatgtgacccgggcctgggaagatgggcccagctgtgggaggtcgtgcgggctggggactgagagtgccggaggagggcctcccaggaaaacccagctgcacaggaagccgggccagcggcctccggaagcctctgggctttgcaagctggactccccagatctgtggctgtggggccctctcctgcctgcagctgagagcccttgacccgcacctgagggcttcagaggtccgggagggggatgtgaccgtgtccccagggtgaagcccacccgagtgtcactctggatacagccctcacctcttcctggccccctctctggtcatggggacgctgcctggggggggttcccttacatggaaggagctgcagctgagctggcgggcctcgcacacccccaaggccgcctgacttccagcctccaagtggggttgcattcaccactcaggacctggagcctcagccagagagggaccctccactgcctctttctctgtctcttgggaaaggtagggtctttgtgccccctcccacccagggacctggcatgttgggaggctaagaggaagctgccccccgctcatctaccccccaaccctcccagccagcagagttttacctgtgtgcttagaatctgtgcgtggagccagaagtcacaaggttggcccagctgtgtctgaccctggttgtgcggtcttggacagtcccagccctcctggagctgagcatcctgatctgtagaggagaggctgctgtgccggccccgcagggccctgtgcagaggggagtgtgtgcggctgtgagttcaggccatgccctcagactggaggataggatcggaacagtgggtcaggatggccagagggtcccagcctcaggaggaggcctccacacctcccagcacctccacaccaggaaatgcagccaggcccccaggcctcccatgtcaggaagcagcaccccgccccccacctctggttgcctgggcctgagaagttgagcactcctcccgaatccgagtgccctctgacccctgcttgggtagttgtccctcctgaactgaccgcctgtcctacacagtcccctgtggtttgcccgacagggtggccagcgagtcccctgcacagcacacctcccccaggagtgctgcctgtgatgatggtgtaaagggtgcccccccgagcccccggaggcatgcagtggcgcaacagcgtgagcccaggagccccggtgagctcctggatggagaatctgttcagatcactccccagcctaaaccttccctgggtgtctgctgtgcttggggcgctgactcatcgtggggcggcctgtgagaccctacgtcacctggccactcccctcagcccctgttcactgcaccggtcccctggcctggctgctcctggaacatgagggctcatcctcacggaagaatattcacttgttccctcctggaaagtccctccctagacctcctggccgcctcattcaggtcttgctgaagcgctgccatcttggagaggcctccctgtcacccgcagttaaaacagccctcccatgcctgtgggtggctttctatggggcatggatgagtattggagagtcttgccgtttatttgttcatatgccctctgggagggcaggggacactgacttgtgttgtgggtgccttgcatgtcacgggtgctcagtgaatgcctgttaagcattaggggagcacaaaggagggaagcctctgtccaactggagcagtcagggaagacttcctggaggaagtggtatctggtctgcttagaatgtggcgatttgtctgtatgcagacattagattagagggcaaaggccattatcataacttagcagacagctacaagcagctaaggaattgctatgacatggactgctcgtgattggagctaagaaggagtcagagacagaggtccctgtgctctggcgtgagtccttgggggaggctgagctcccagaatgtggggccgcctgtgcagaggccggaggtgggagacacacctgtgagtgccggtgagtgtggggtgagccactggggctggatcagaagatgggaatccctaaacccaccaaccagccttggtgccctgggagtgacaggagacggggcttctgggggactaacccagcacaagtggacgagatgggatgcaggggaaaggacaaagctctctgaggctttgggaagctgagttagggtagagccatgacagggtgagttccagaagcaacacaagaaaaaatagctagactgggttttcccttcactgtgggagatgccccacctcacttcccccgtcctccgggctctggcaatgggctgggcacagtgaatgggttccatctgcaggagtggtcacaccccttgggcacagctgcctcatacactgtattgagatgggatccgaggccgggaagaacagcttcttctgtaggttgacattgtcagccttcggggagggaaggacggcagggggcctggagcatctccttttgccatccacactctgtgcctgcctgcagggtcttgagccctgtctgttctgcctcagtcctggtcaggaacttgttggagcccataggggcagtcaggctggaacaggaggagaccaggccggcaggggagccgagagggggccctggacagcacccagggctgagtcatcctgggcctgcccgacttgctatttggagctgttcccgcttgctcatcatgtgcaaggtcctgatccactcgggtctgtttaaccagcgcccctccccaggcccagttagcctggttttcgttcgattcatttattgtcatcagtgccatccttgcaccacgtaactagcctttgcagcatgccagccaccaagctcagggccctctgtgcatctcctgtaaccctcacagcaacccgggaggcacagagaggctgagtcgctggcccatagtcacacagcaggtatggggcattgccaggatttagccggatctctgactccagggcctttccagggccttgggtgggacactggcaaggaagcaaggtatgaacactggccctgccttggacagagctcggggacggtggcctggcaggcccagctgacacagtgaccctggtgcaggttcaaccattggcaaagtgttcaagtacacacagaatctcaactggggagacaggcgaagcggtcaagggagggctgtgagtgacaggtggacactgtacctactggcagatcagctgaccttggtgccttctggagcctttcaacttccttatccagaaaaagaggaactaacagttccacccccaaactgggtgggagtaccacattcgaaattgaagcaaagctggtcgtgtcacaggctcggcagatgttagctgtgcaggcaacttagtgaccatttgaagtaggctgtgcggcggcatcctcatcttgcagatgtagtccagagaggttagggcactaaccctgggtcacacagcgacagctcaggctacagagagcagtgctggatgggagggtgttggcagcttcaggcacaggctgggagggctgtggggtcagcagagggagggcacacttcccagctggtggggttcccttgtgcctcagtactcatgtgggcccaaaggagctggaaggagggaggttagagccacccatgggttcagaagctgataagcaggttattgactctgaatttgcctcatcgtatgtaaattggggacaaatttggggatttaatgatataatgtaagaagcagacatgtcacagccctggttatacagtcagtgtataataagtggtaagccgtcagaggaggcagccggtgagaatgggagcatctcagcagccctccgccccctgctcctggttgcagatgtacctgttcttggctatttgtgccccagctccgtgtcctccggtgtgtgtgaggccaagctcctggggtggggacttgggggtgtgtctgcagctcctgaggccaagaccaaggctgaggccgaggctgaggctgaggccaccttggtgaggaggaaattgcaggtggagaagctcgttgaccgtgaccttgatctgaccgtaattttgatggtgccgatgccgtcagcacgcaggcctcctgccctcgccacgactggctcctgcagcccacctggctgagaggtgtgctggctctcgcaggttgcaaaatggggacatcaccgtccgcctgggctacagcgtgctcgccgattgcatttggggagggactgagggctgattgtgttgtggggatgttggcagagaatcagagagggcatccaaaaaggccaacagttcggtggggagaggaggcgcaaggctggttcctgttttctgggctttgatcgaaagggaacaggggacacatctggggacagtctccttcctggaggaagaagggcttagggtgctggtgtggagtttgcacagatggggataatgagctggagggtgctgggcaggagctggccagtaataggctgacgagggaggccctgctggctgggcctggttttcaagtgagcatcctgagctgcggggacccagggggtcttagagacctcagagctgagactcgggaccacagaggggtgggctgtgctcagggcaacacagcggatggggcagatgttgcgaaacctgtctctctgcctctctttctcctgctacagaactggatcctcccagctcatggctgtcaaatcctttagatgcttctgggttccatgggcgccttacactggcttccctgtaggacagcagaccctgggggttggctctgatggtattcaccatggggtaccccatgcaagcacagtgctttcacgcccagcctcccagcctgtggagtaggcctgtgtctggccagcctcactttgtggccagaggagggagacagtggttctggagacaggagctggcctggggctgccctcccagcccctgttctcccagctcatctccttgccttgcgggtgctggccaccctccccccgccagctccatccccagctttctctgcccgagccgtgacctgtcagtagggggcagtggaggccttgaaagtccttggagaggactttgaagcagtttttacaaatctgtccctggaaagtctctcctgtcacacccccagcggctccctccctcctaacatttttcctggggttgtcatgcagcggggggtggaggaacccactaggccgtggatagagcagagccatgttgacacaaaccctggctgaacccacatgctccctacagccagcggccgatcactggaaccagggaagtgacctcatagcaagggcccgcagagcagccatcacgcattcccgatcttggtttctggacccagctctggaaaagaagccagatcctagccacttggagctgcctagggaagaccccagcctggtgccggctgacagctcactggaacttttcatctgcttggccaggtgatgccaaggggcagaggttagaagtgctaagaagcaggccgagggtggtggctcacgcatgtaatcccaacactttgggaggccaaggcgggtgaatcccttaaggtcaggagttcaagaccaggctggtcaacatggcgaaaccccatctctactgaaaatacaaaaattagccaggtatggtggtgcacgcttgtaatcccagctactctggaggctgaggcaggagaatctcttgaacccgggaggcagaggttgcagtgagccgagactgtgctactgcactccagcctgggcaacagagcaatactccgtatcaaaaaaaaaaaaaagaagaagaacaagaagtgctaagaagcatctgtcttcctgattgaaaagcaatctttgctgggcgtggtggctcacgcctgtaatcccagctttgggaggctgcggtgggagagtcgcttgaggccaggcgttcgagaccagtctgggcaacagaggtgctaggggtagtggcgcttgcctgtagtcccagctcctcaggaggctcaggtaggaggattgcttgagttaggagtttgaggctgcagtgagctatgaccacaccactgtactccagctcctgggtgacaggatgagaccctgtctcaaaaaacaaaacacaaacaaaaaaccaacgtttatcttttgtgattttaaaaatcacacctacttgtgacaaaataattaaattagaaaatgtaaaggaaatgatcaataataattgcgtcctccagacaaacactgttaacatgttcacgtttccttctagtctttttctacatagacactcaatacttattaatttgttttgaactaaagatggttttctctgctttgtatgagaaccacctcagccaggcacggtggttcacgtctataatcccagaaagctgaggcaggcagattgcttgagcccacgagtttgagaccagcctgggcaacatggcgaaactccatctctacaaaaaaacacaaaaattagcctggtgtggtggcacatgcctgtgctcccagctcctcaggaggctgaggcaggagaatagcttgagcccgggaggtagaggttgcagtgagccaagatcgtgccactgcattccagcctaggcaacgggagtgaaatgctgtctcaaaaaaaaaaaaaaaaaaaaaaaagttgccacgttgtcacctctctcagggattttcatcctttctacttttcgcccaagacttgccctgtaaaaggatgaggccaaatagccatgggagggtggtactggatgttcaaaaaaatgtttcgtggctggcgggacttagaaacaggttggggaggtttcagcagagggtggaccccagctgggggtggggggcagcaggggggcccctcacatgctctctctgcgtgtttcatggggctgcctgtgaggccgtgtgaaccagagcccggctgggaagccacatgctacctggactctgacctttcctggcagcatgaccttagccaatacgctcaactatgttcccctctgtaaaatgggctaatagaaatgtccactcgagacatgatgagaaacaaaggtgttcatagagcaaagtgcttagaacggtcctggcatgacaggagcccacatgtcagtgctgccgttggcatcgtcatcatcacggcggcattggctgctttgtttctcccttgtccctgtcaccttcttccctcagcaggctctcattcacttgttcatttattcatggccgaggccccgtctgtgtcaggcctggtgctgagaacgggggtagagagatgggggctgtgccctgctccctgacccaagggttccctttgcaatgtgaagttcttggagactggaccctcaggctgttccaccagcccctcctcaggccagcttaacccttccgtgctcgttttctgagctgttagaggaagagagcgggaggaaggatggagtggggtttttgtggggactgagcggggggtgtgtgaggccctggaaatggtgcctgcggcactcacgcagcattagcttttgctgcagttgctgtttggagaatattcttggatttcaggacactgatgacagaaggtggaacgctttttctggaagccatcaagaggggaccaccgcggcggctgagcagagttgctgacttgtgagctgtggcctgaccacagtcactgttctcatgagcgaggccccctgtggtccccctcccaggaatttctggccccttggcaggggacagttcagggctgggggtgggtagtggtgtctgcaggccctcttggagtcagagaatcccctgtcgccgtggcggggctgttccctcctgcccctcccctcccgctgtgctctcagctgctccgacaggatgcttttggcctgagagacagaaaccccaactctgaatggcttcagccctcaagagaatttggagcttttttgtgcaaaatgagatgttctgagcatcgaggatgctgtgggggatcctccatcccaccatctccagccgtggtgtccctctcggtcacaggatgctgcagccacgttgcagggaaggagagcctcccttcctgtgagcctagggagcccctccatgcagccccttcactggccattgcctgagacccgacctggtggctcctgccccaaggagcagaaagggggttcgctaggtcagggtggggctgggtgcgaggaccccccccggccaacagggtctgcttaggtgtccgtcctgttggggcagcagggaagggacccacatgtggcactgggacacggagaggcttttgtgcctgtgacggccaaaagggatggcgccccagccacgttcccacccaccccgaggcccagcatggccatgccggaaatagcagcatcgtccccctcactgtcctggcttgctttcaataggccagaggggtggggctggagcgggcgtctgacctgtggctggatctagctgcccgtggacaggctgtgagtgaatctgcagaggaagggagatgggaatgccgggaccttctcctgcacctcccgaacccccgttccctgtgagttagatggggagtgcacccctgccctcccctcctgggtatcccctgcgccccccgccccaggcacttgatgttgcctgttcattttccctctctgcccctcccgctggcccttcccatatggtcctaattaggaccttccgcccgttggtggatgggcagagaggggagcttgctgtggggcctcccccgatcgggggacttcccagcacagagctttctggcctctgcagggacgctgtgtgtgcctgtgtgagtctggcgtgttagaagcgctaagctgcagctgttctgtgcgtttttcacatttctcacttctcaaaggccctgggtttggtgtctgtgggctggggatctgtgttggggtctccaggaggcccttggtgggagaggcagggccccttcccctttaatctgggcaaccttgctttggcctgctgtctgcggaaagtgccctaggatacggtggcaggactggctggggttctggctccaggcccagccccagcccctgtcagacttaccctccttgtgcctccgttcaccctgtccacccgcagggcctgcaggagcatcctgagagttggtagggtggcctgcccggcgtccgcacagggtctgctggtgggtggctgaggctgcggtgaggtctccatggctccctcgtcctgcacatccttcccttgttgtgttgtctcgctagcatatgagcccgtactgcctctgagtctgcagcctgttttccttaccaggtggctaagcagggtggcagccagggtggcagagtcccattggcctgcaggggaccctctgtgggctgcaggtagtcccctgtggttgaaggtgccctggcaggacctgcaccatgacccccgtcaaagctcacgtccaaggcatttgtgggcacccccgccccagacgtgagggttggcatcttctcttgcacgtgaagcaaaggcctgtttgaaggagcgtgtggaagcctgggtgtgatgaaggcaaggaccggtggctcacccctcttgcacctggaccttgggtggcaggcctggggccttcagtccttaattcaggagggtagccagtcgctggaactaagagtgaacttcagctgttgttgccatagctggagggaagaggggaaaggaggcgctgcaggggagcagagacctcacccttcctctgccgacatcaggctgccggtgctggacggggccctggcaaccgtggcaggagtggtgatgtccgatgatggtaacaagggcttcctgaggaccccgagctgtcttaagggctctttacctggagtaagtatcccctttaatcctcccaacaacactgtgaaattgattctgttgttattcccatttcaccgatgaggaacccacagcccagagatgttaagtaacctgcccaagcctccctctgagcatggcagagggagggtccgaatgcggaaagtctggcttcagtgcccccatccctaaccactgtcatttacctcttcggccagccctctgattgcaaaacctgaggcccagaggagtgcagtgacttggccagcttcgcacggcaggttagtggcagagctgagcagtgtctcccatgccctgattctgtggcttcttgaggtggctcacccctaaacacgccccccatggtggctctgtttcctcctctcctctgaacctgccagcctgtgctcaggcagggggagaagtagagcaaccatgccgggcgggtcgtcgtgccccagtgccgcctgccctacacctgattggcagcagagtggcccctccttggtgtggtctggaggtgccagtggtcactcatcagcacagcccagtctcacacatgtcactcccaaaggatgttgacacagaatgaagcagctaggggaggcggacgctttggcacgagggtggcgtttctggtaatccgtagtgctgttgtctgtggctgcctttggctggcatctcacctcctcctggctgtcctgcagccacctgagggaggtcagcatgtcgccttcatcccaggacagtgtgaatgcagcagcgcaagcttgccagcgccgcactgcgggatctggaggcctttgctcctgagccctgcctctgtgtaatccctaaagcacggacttcttaggggcttccattcctccacctggaaaaaccttacaccgtttagggcttgaggcagggctagagcatggagacgttgctggaggaccaagggagaactgagcgcgtgttctcttggcctcagcctcgtgtgtgtgtttatgcatgggtactttgccatccacactggcttccacggctgggtgggagttgagttgagctcggcggctgcctttccaccctgcgggcctggttggggagtgtgaggatgcctgctggaagccaacgtgcacgaaagagttaatggtggatcccatttcctcagccccctctccagctttcccagggaaagggcaggaacagagaggccttatcttcagaggaaggggtgggcggggacacagcgctgttcggcacagtcccctctgagccaccctgcatgtttcattccaccgacttctgcagcccagctgttcagagcggatccagaaggtggagagagggtttccaataagcagaggatggagtgaatgtgagattcattactgggatttggcaaagcaaagagcctcactttctccccgcagatgggacgggggcggggctggagccagcggggtgggggtatccagcaagagctccttcccatcctcccacttcctttgccatgggccccctcctccacgcagaccctcagcctggaatgatcagtgtccagcttttctcgcccctctcctgccccgctggagggagtgacctggcccctggccccggccacctacacctcctgttttgctgcactagcctcgtggtaggggctgcggcggaggtgggcaaaagccgcttccgggcagccagcccccatcctgggagtgactgaaagtccttgggggttcctgcagggtgagctgcccattctggccctggtaaggacacccaggagagggccagggtgcctgtatttggggcacagcataaagaacagccgtaagtgtttctcaggcaggagggtgccgaagcattgggaagctgggatttagaagcattgtttggggtggtgagtggaagatgcaggacacagattcacgcgattgtgcagatcacctggcctcactccctcggtttacagtggaggaaactagaggccgagagaggtgaagtgagttccctggggtcacacagcctagccaggcccagggcgccgacctcctgctctgccttcccgtgcccattcggttggcatcagcatccctgccttgacacccccgtgtggcagctgctgtgattctgtgactcctcctcaccccaccccagtggggccctgcgagggaaagaagaatgccctatgcagaagtggttggaaagcaagaagcctggagagaagtgaggcctctgtggtttggcctgagtccaggactcatggcctggttcccagggatggagcaccgacccctcccttctacacccccaccccacgcccccaggagctccctatggggaagccggaatggacctgggctcagagattgtaaattcatcttgctggatgtgtggctgcctttatgtaaccaactctctcacggagaagccaggggatggctctcagtactctcgggggtctctcagtgaggtgggaggacctcgagaggtcaggaggctgctcaagaccttctgcccctcagggaccaggtgagggcttgtcgactgctctgacctcctgatgcttctggtggggagacctcagaggggcctgccgtcaccatcgccagtggccctggcctgcccagtcatccttctggggtggccaaactccatgctgcaaaagcccaagtgaaccccagtagtggcctgggagaatcatctgtcacgagccaaggatggagtttctggggaggactttctgctgccccccaacccctttcgggtacattctcctgtagccccactccctgtaagaaagtcaggtgcctcccgaagcttctccctggccccaggccagaggtgacagtgggggccccttgcttgcgctggtgactgtggctggttgttggtgcctggccctgccctgcactgtgcacccattgaaggcggcatcatccgggcctctccggtggccatgcatgggtgagcagcccacgacacatctgcttccagcatcgtgtgggccggggctttcagaggggctgagggcttggatggccctgcaggggggtgctcctggccttgtgaccgaaaggagctgaaggtttggagaagccgttgggccgaggtcagttcttatagatttggcgaggagggaacagatgctcacggagctgctccaggcactgcacacactgcctcactctgcgctgacagccaagaggctggttccccgccgacccccattttacagataatgtgctcccccagttccttagtggtggagccaggattcgaacccacgcaggcagcctcctgggcctgtagtcctacccttcatctccctccaggacctatgtcttggggttggcaggataatgactcccagagttgagcacatcctaatccccagcacctgggactacgttaggtgacatggcagggccagctaaggtcactaatcagctggtcttaaaatagggagatgatcctggatgatccacacgggcccgctgtcatcacaagagtttttaaaagcgcaatagaccatctgaggggtgcagtgggagaggcttggaaggaggaaggaggccacaagccaagaaatgcaggtgaacagaaaatgcaggaaaacgcagtctcccctgcagcctcgggagggtgcgcagccctgtggacaccttccctgtagcctagtgaggtggagtgtgggactaatctgtgttgtttgacatcacaagtgtgtggtcatttgctacagcagtgatgggaattgaatgccattaggcagcagtgcttctatcccggaagaattaggataaattcccctgtggatctcaagctctgggagattctgggctcctctggactgctccagttctgcaatcataggaaaggtctcccatgtctgtttgggagaagaaaaccccgtagcaaatccatttccccttttgacaaatgaaggcgagggtgtgggctggacacatgtttcctttttgtggattttttttgttttaacacttagaattctgtagctgaaggagactttggggggttgtctgcctgatttgcaagtgaagaaatggaggcccagggaagttaagtgactggcccagggtcatgcagagtcatgctggaatatcaagctagatagcccagttcctgctccaaagtgctttcctccctggttggggaggagggttggagggagtggaccccgagcaacagcagcattggcaggggttggaagagtagctactgtatccaggtgctggagcctctggccacttcctgcaggaaccaggtgacccaccatggcacaggcctctccctgtctatctgcagccctgggggccccagggaccagaggacactctggcctgagggctggggcctgagagaagagatggaagtacccctagtctggcctgcccccgtggcgtcctgcaggcatatccggcagcccaggggtcctagagaacttggctggtgggcgtccccaccttgccgcagctgcaccctgtggccagcagcttgcaggacttgggctgttgcctgtggccctgaaacagtcattttctgagctgagtggggatcaggtgagcagatccccacaccttaactgctgtgatctttctgtcctggaggctggtgggcagcctggttggtgcttcatggcactttatgaccggccctgtcaccaggctcgtgagttgctcccctcctttcgggcatcctgaacggcttccctgagagccccgccctgggccttcgcctctgcaggcccccgctgcctggggcgcctccttcccctggaagctgggcctctttggggactcattaagaagggccttgccgagtgctgccaaattgccccatctggtccccatttgttccacttaccaccctattttaacttttatgtctcctccttggctctaagatctgagcaggcagggcctgtgaggcaccccaggtcccctgatgctgccagcacccaggggactgttagtacatatgcagggagggaaggaatgaaggaagagatgacttggggagtcctccagttcccatttgtaactggcacattgcgacaaaacactcatggcattttacctttttcatataccttttttttaaatttatttttatttgagatggagtctcgctccgtcacctaggctggagtgcagtagcacaatcttggctcactgcaacctccacctctcgggttcaagcgagtctcctgcctcagcctcctaagtagctgggattataggcgcccaccaccacgcccggcgaatttttgtatttttagtagagatggggtttcaccaagttggccaggctggtctcgaactcccgacttcaggtgatccgcctgccttcgcctcccaaagtgttgggattacaggcgtgagccactgcacctggctttcgtatatctataaaagagaatttgcccagaaaatctttcagatgcacctttagggttttaaggcacagatacatgaagcttgtcagtgagcagctgctgcttattcctttttctcttccaattcagagcggcctgcgtcccaagcggacagctgctcccttcctcttggctccctgctgcccacgctcccacagaagcagggagaagaggcaggaaggtgacgcgtgatcatccgctgggcgcccgcacagtgccgtctgcacaggtgccatctcctttacttgtcactctcctcgctgagccctttcccctttttgcagatgagagagcattgcctcccagaggttaagaaatgggcccagagtcactcagctgatcagcgtgcagccagatttgaaccacatcctgctgatctccatgcctgcaggcctggcctgatgagatggacagctgggtggtggagaccttgagaccctggatggctcccaaatagggcctgtagctcctggacagggagagtctggcacaaagggtttgtggagtgagctgggggagaaggtggcttagggtccctgtctctgaacaaacagatggaggggctattccagcgttttctcagcctctggtgtgctgggctcctggttctgggaggagagaatggagctggcctccattctgggctgggctggtttgggcccaattcagacaagcttcttagtttgccatgagtgacacttttgcctgccctggtgtctctgccaaaaatatgaagggtttcagaacccccaccccggcctgcttccctcccagacttggagtgggtctggggctgacaacagtctcatgccagatagcctgagcagccaccagtgccatcaggtctgacactgcggcccctgccccggagggaaaaacaaggccctctctgggggattttctgccagcttgtgaaaacaggcctggagtcagccagcgcccccatgcttagacacttcgtgtggttttcaaagtgcttttatgttgctagctcatatgatcttccccaaaaccccataagggagggcaggaagtttgagcaacagcctgtcaagcacccatacagcaggtggtttcattgccctccatttacagacaagtaaactgagcttcagggtggctaccgcttgtctcccaagccacccagccatttagccacggaagaggtcatgactttttacaccccagtgaagctgaagatttttctttccgtttttaaaaatgtttactccccagggcagtgaacacctggtgcctctgtctagcgcaagaggtgaacgtttgccacttccgtttctttcctcctaccagacctgaccctccttttgtgacgggaacatcctgcaggcagtctgtcctgctttcatagactttgagaaacggggtccaaattgccggctgtgggtgggacaggcgacactgcagtgaagaggtggagtatttttgtagcggggaagaaatacatttcctctaccctcttaggttcagtgtttgggggtctgtgaattaaactcactcaagataaattaatgagagaaaagacagatttaatcacatacgtatgggatttcactgaaaaacgtgactcaaaagagcaggtagaaggtggggcccgtgactggtccgaaggtagtgagttatctcagttgattgttcacagtcagttacagattagactccttgttccactgtctcccctcttcccacttgttttgttttttttgagtcagagtcttgcactgttgcctgggctggagtgcaatggcacgatctcggctcactctaacctccgcctcccgggttcaagcgattcccctgcctcagcctcccgagtagctaggattacaggcacccaccaccacgcctggctaattttttgtatttttagtagagacagggtttcactatgttggccaggctggtctcaaactcctgacctcgtgatctgcctacctcggcctcccaaagtggtgggattacaggcatgagccactgcacccagccaactagtcttaaaaaaaaaaaaaaaaaaaaaagaacttagggcccgtatactatcttaataggaaaaaaggaaggggtgaaagcacatattatgggccgggtgcgatggctcacgcctgtaatcccggcacttcgggaggccgaggcaggtggatcacctgaggtcgggaattcaagaccagcctggccaacatggtgaaaccccgtctctactaaaaatacaaaaattagccgggtatggtggtgcacacctgtaatcccagctacttgggaagctgaggcaggagaattgcttgaacccacgaggcggaggttgcagtgagctgagatcataccattgcattccagtctgggcaacagagtgagactgtgtcttaaaaaaacaaataaaaaaaaaaaagcacatattatggcaaaacaaatgagtttttggaaagataaataggcccttaggagctgagatgggagatgtgaagtcttgtgacaatgtcttcttaggtgtggtgtggaaactactcacatcttccagggaagagtcagttgctcccagggagcagatttgggcctgtataccatcttaataggggaaatggaaggggcaaaagcacatattatgggctgggtgcaatgtgcccagtgcaggaggcagacgtggtttatggttgctgttgaaaccagtgcagggcccgattgctttgtattgagtgttgaggatcctggttttgtatcagccatgagtttgcagctctgggacacacttgatgttggctcaaggggaaatgaggttggaggggcagggtggttggattggatgtgggcctggggccattgctgatctacaaagtggtcatcacacgggaataatagagctggctacagaccacaaccagcaatattatttaaaagtaaggtcacacttttaataataagtcacattttaagttattatcaatttataaaacacactgttggtataatgatagcttttcaagaaggatataaaaaggcatgttgggctgggtgcagtgactcacgcctataatcccagcactttgagaggctgaggtcggcggatcacttcaagccaggagtttgagaccagcctggccaacatggtgaaaccctgtctctgctaaaaatacaaaaaaaaattagcttggcgtggcggcgcatgcttgtaatcccagctacgggggaggctgtggcagaagaatcacttaaaacctgggaggtggaggttgcagtgagctgagatcgcgccactacactccagcctgggcaacagagccagactccgtctcaaaaaaaaagaaaaaaaagaaaaaaagtaaaaaggcatgttgaaggtacctgcttgtggaaagttgcaacttgacgggaggtagggcgagcacttcttagaaaggtggaaatgggccctcctgctacagagacccacaaacatagactgaggcctgcagcctaggagactcaaaagaggcaaaggtgaataagagtcaaggtctccaagtcagggtctgactctgggggtgggggtcacatatgatggaggatgtcaggagggcttcctggaggtggtgacatttaccaggggggattttaggtggggtttgcgagacagtaggacctggctgaagagcgtaggctccttagacaggagtgggaattcaggcttgaaaatgagttggccagattgcaggggtcctcgaatgcaagggaagaatttcaactttaacagaggagcctgggaagctgtttgggaaaaggagtgataaagcgggaggggtcctccagcagagccctgcatgggcaggagggagcgagatgggaggtgggtgttggtaagggatgatcccagtggtccaggggagcagtcatagggtggaaactaaccttgtggggtctgggcaggaagggactgatttgagacaccgggaagaaacagccagtaggactttggtgagagggctgggggtcggggaggggggtgtggagagtgggagcttgagtctctgaaaacagacagtgttccaagggggagacctgaggcaagatgtggagaggcagctgagctgggaagctggaacggaggtgtggtcactccaggagactaagtcagggggcgaggggacccttgggagctatctagaccccagcactagggaatacggaggggagaaggaggggagaagaaccagctggtgcgtgtcaggcactgccctcgaggtcagatggggtggggctggatactggccatgaggattttttcaagagctgggttaatagtgagacgggcggacaccagatggctcgggctaagaagtaagtgggcggtgggaagctagaagccgtggtgtagacctactttgagaggttgggctgttcagacagggagaaagttcacagtttgaggaggtagataggtcaaaggaagagggtttgcttgtttttgagattggggcatcctgaacgttctcccaggccaagtgagaagaaaccagaagaggaacatgtcacccaaatgtgctgaaacagcccagcagctgcgctgcctcacagaaaatgtgcagaggcccctctgtcccaccatgcctgcctggggacggccttcactcgggctactcagggtttccccagcctgccaacccaagggtggcaggagctgtgggtgctcccagccccttctcaaggttggtctgtgggtagaaatgtgggctgcctcggggcgtcacagctacaaatgcataccagccctcagaaccacattcctgctccccagccctttcctccgcacccccatgcagaagcgcggccgccagctcacaaaggatagggagggatattgctcttggcatttgatgggaagcatctgctgcatcccattggggtgttgcccaggatggattggaaaagagttggcaggaaggctgagctctgtgctcacaacctggcttggtggtggccgaggagcttggcaggagcagagtgcaggacctgggaactgggggttggtgcatgtgtgcacgcacgtgtgtgtgtgtgtgcgtgcgtgctgggtgggtagggaggaagctgtgaaaccacatcccctcctctctgctgctgtgttgctgtgtgtttcagcagcacgtgggtgtcaccacacttcctagcaggtgtcaacctccaagactgttctgggctcttctcccagttggctgagttggaggtgggagtcccaactgtcccctgtggcttccagagtgggaccttgctgtgggataggctggccaatggtgctccctcccctgtgacccttctgttgggtgggtcacgaggaaggactgtgggtgttgcccacagacaggtggacatgtggcaaggacaccttgggaccttctttctgacgccccttgaagggggcactttctcagctttgagatgagtctctgtggatgtgggaagttcactatctcaagagcagcagccttggaaaatccaacacagaaccccgagtaggggcgggaaggggtcctgtcccgctcactggctgcctggcagagttctgcacaaggaagcgcctgtgttgctgtgggcggaggaatggactgagggctacattcgcttcctgttgccgctgtaactgcttatcacaaactcagtggcttaaagcaacagaggctccttcctttacagtgctaagggtcagaagccgatcagtctcaccggactaaagtcaaggtgttggcagaatccattcctgcctcttccagctttgggtgggaggctctgctggagttccttggcttgcggctgcatccctccagcctctgcctccatcctcctacagcctcctccttctctgcagtcagatctccctctgccttcctcttttttttttttgagacggagtcacccaggctggagtgcagtggcacaatcttggctcactgcagcctccgcctcctgggttcaagcgattctcctgcctcagcttcccgagtagctgggattacaggcatgtgctactacacctggctaatttttgtatttttagtagagacagggttttgccatgttggccaggctggtcttgaactcctgacctcaggtgatctgcctgcctcagcctcccaaagtgctgggattgcagccatgagccatcacacctggcctgcctccctcttaaaggacgcttgtgatttggggcccacctgggtaatctcttcatctcaacatcttcagttacatctacagagtccctgttgccacatgaggtaacacagtttgggaagggagagttattcagcctaccctaggggcctgtggtgtatctcagggcccttctgattttaagatataaagcaagaaaacaaactggctcaaggggaaaaaaggacacgttgaattctgttgctttaaatgtatatttttttattgtgctaaaatgcacagaacataaaatttgccattagtaacactgagtacattcacagtgtcgtgcaaccatcagcactgtctagcgccagaactttttcatcaccccaaagggaaaccccgtatccatgaaggactcactccccattcgccctctccagcccttggcagccaccagaatgctttctgtctccataaattcatttttaataagtgcaattctgtgtgactttaaaataaataaacatgagcacgatgagttgcttattggaaggatatccatgcggggaggccggcgtgtggagtgcgtaggcctccggacgggcaggagttgaaggggcgtggatgtgccgccctctcctccccttgctctttccttggggtcactgcctgagtatccctctttgcaaatggccccaaataatgtctcagcccccacgtctgcatcgcctcctagcttcaggaccctccaccaaaaaacattccaagcttcagactcactcctgggaaaattccaatggcctcactctcccttttgagccagccagatcccatggcctgtggcgggctgcctttgagtcctgagcacctgtgagctagggaagcaggacaggcacacccagggaaggggaagagtcgtcgtcagtcacagtaattgatatctttggaatcgtctaagagatacttagcgtgtgcctaaaacattcatttctttttttgtttgttttttgagacgaagtctcgctctgtcgcccaggctggagtgcagtggcgtgatctcagctcaccgcaacctcctcctcccgggttcaagcgattctcctgcctcaacctcctgagtggctgggactacaggcacacactaccacgcctggcgaatttttgtatttttagtagtgactgggtttcaccatgttggtcaggctggtcttgaactcctgacctcaggcaatgtgctcgccttggcctcccaaagtgctgggatgacaggtgtgagccaacacacctggccacattcatttcttaggagaagctctgcattttctgaaagtgaaatgtccccaggcgggtgacactgatggtgggatctgtggcctcaccagtgtcttatgagagatgccgctgtgtgtttcaccaagctgtatcctattgtcctctaaatgtggcttgtagacatggtgccgagaatgatctgggaggttcaaatcataatatggtccaaatcaacagctctctgatgacctggtattatcctaggatcaaattgagactatccgaggatgggcgtggtggctcacgcgtgtaatctcagcacttcaggaggctgaggcgggcggatcaattgaggtctgtagtttgagaccagcctggccaacatggtgaaaccccatctctactaaaaatacaaaaagtagccgccggacatggtggtgtacgcctgtagtcccagctacttgggaggctgaggcgggagaattgcttgaactcaggagacggaggttgcagtgagccaagatcacgccattgcgctccagcctgggtgacagagcaagactctgttccccggcaaccaaaaaaaaaaaaaaaaattgagactctccgagctgcactgtccagcatgatagccactggctgcacggggccatttgaacacctgaaatgtggtgattccaagtggagaggtgccgtgtgtgtgaagtgcactctgggtttcagagtcctagcaagggggaaagaaaagaatatcaaatatctgtcatttttacattgattacatgttgaattgataatattttgggctctgttaagtgaatgatattaaaattaatatcacctgttcttacattttttaatgatttcctttttcttttcttttctttttttttttaaatatggggtctcacactgttgcccaggctggagtgcagtggcacgatctcggctcactgcaacctttgcctcccaggtttgagcgattctcctgcctcagcctcccaagtagctgggattacaggtggctgctaccatgcctggctaatttttgtatttttagtagagacagggttttgccatgttggccaggctggttttgaactcctgacctcaggtgatctgcccacctcagcctcccaaagtgctggtatgacaggcgtgagccactgtgcctggcttgttcttacattttttattgtaggtgctggaaaatgtaaggttgcgtctgtggcccatgtgccgtttctgctggagggttggaccgagggccagccgagaaggctctggggctgctctacctgaatgctgagtgtgtgctgagcggtagagaactttgagaagtgctgaaggacagaggctttgtgtgggggatgcagccccaggccggagatgccttctctgtgctctggagaccctcatttggtgacagcaagaggaaccactgcaagaggggcggccacctcagcaaagcacccaggatgctggcctcccagctcaggaatccagaggcagaggaggggaggaggctgggcttggaggagagcagggtcttgggccctgggaaaagcctggggggccagaaagctgggggacagattgaggccagaggcaaagagaagaaggttcggagaggagggccaaggaagaagggttctgcccacggggagggagaggcccacggggcaggggcgtggtgggagctgcatcctcgaggctttctgttgaccctgacacctggccagaaaggagttccttctggcatcctttgtcagcggtttctggagctgccctttaggggccagtgatgagggtgccctgggctgggctgcagacagtggaaaagacaggctcttctcactcccagtgctggggaaattagcttcttggaggaagggggagctgtattttctgagtggccgcacttcctggcctagacgtgtgtgtcttgctgtaattttggcgactggtgttggtggtgcccattttatggatggggaaggtcaaattccacagatattgagtgacaggcccagggccttggatttcagtgtttgactcagaacccaggtctctgatctgccaccagcctccctcccattcagatgggaacagggactccgggcatgcagtcttctcccagacactcccccggctctggcctggcgcccggagaccagtagcagcagctccccacggccgttcactgtgagggtggggagggccgtgggaccaggaggccttagggggaaagttggccatgaggagtgggaagcgacgggtcagatgccagtgactgctggctggggagccgctggacgtggctggcctgtttggccagtgtggcgggtgccccggggcttcagtcacccccagccacgtgtgggggtgcgggatgggaaaggtaagagtgtgtggagcccagtcagcactcaacatgaggtcccgtgggggctgcctgagggcgtagcttccagaattcagcccctggccctcagaaggtgtcaccaaaggcttctttccatttgagtgaatccctcccagcccccagcaagccctcggaacgagcccactcccaggcgctctctcctagtgtgggagtggccacgcccctgctgggagtgactcacttgggttcagaggtcgtggcactgagatgggtctggcagatcccagcgtccaggcccagcccctatagtgtcagctccctcctctggggacccccttgcttgtgcccctctgggtcccagcacatcccaggcctgcagggagggggagaggaagagactgactcactggccaggtcccccaggggctggagaggctggagaggcaggagctggatcagatctgaatccagaggctctcggaggaagagctcagggtgagctgcgcccccatcccctgcccctcctctcctgctccttctcccttccatggtcccagccagcaagcacctggggtagaggggacaaacccaggtggctgtgttccagccctggctgcaggtctgaatggctttctggggtggctggccatgctccctgagagcccagctgtggcgatgtctgagcaggtaggtgggggagcacctaggaagcaggggtgtcaggcagagcacaaggagagagggtgtccaggtcagtttcaggacctggctgagaggagggggctcctcacgggcaccgcctctggcaagcacagggacaagggcaaggacggcatggccagaggtccctgggagcctcttcccctctcttcttcctagcagctccccctcactcttcccagggaccctgtcactttcctttagcgtgtggcagctccttggcgtccctcccgtgccttcaggttgcttctgcgccgggcctgccgctgggcgcccctatctctgcctgccccctcctcctgctcccctcgccctgcccccttggagcaattccccaccgagcctcccttcccaggcagtcgaggtccctccctacctctgccccgcgctctgggaggctccttgttccgcgaccacaaagcccctttgatcctctgctcggctctgagccatgtgacccggtgggcgggccgcggctctcggcgcgtccagcgcagcccgacgttccgctgctggggtgagtcctgctcctttgttcttcccagccttgcaccactggctcgggggctctcaggtggcgcggccgcgaggcggaccctgatggccatggtggcggtgccgggagccacgctgtccctgggccccggcccgaggccggcaggaccgagcggggtccccaggagaggggtggcggggagctcgatctccacgcggggaccagattttcggcctcaaaatagaagaatagggctttgtgtggtcacagctatctctttgtaaatatttggccaactaagctgagtggctaagttctcctgctgcccggagcttcttggaacatgtttccttttcgcaaggggtttccctggcttccaggagggccaggaagaaattcgaattggccaccgctttctctaaaatcactccgctcaagttatcacccctctgggctcccgaagaccggctggctggaggctggagatagtctcaatgctcgaaatgccgtaaccgaagctccccgcggcgccggcactgggatccagggagctgctgctacagcgcagctctggattcctggatgtgttggatatgtgcagggcgttcctgggaggagcggggagggagggtgctgctggcggggctggtctgcgtgtgctttgcttctctacaatggcatgctgcgtgtcggccatgcagaggcatgtcagtgagcaggggctgagggatctccctaacggacctgctttcagagggtcttttcatgctgggagaaccccagagactaaatcatgcagccaacggggtggtccccggcctcaaagcagggaggggcgaggagctttgtaggcaatgccatctgctcctgaaacgccgtcccagtgactctggggactgactcagcctccagcctgctgcacttcatccctggcccctctctctttgctttttcatgtgaaatctgctgtgttttggtcagaggtttggggaacagctctctgctcatctaagataagtttgtaattcctttcctggagaaaaatatgccacccggaagcaggttgagcagtggttttctggcaggtctgttcggggctgtggagacagcacctgctggatcaggatggagttggaatttggtttggatcccacatgagaaaacccgttggaagaggaggaagcagaaaaaggccccattccctaataatgctgtgggttttcctcctccattcattgccaccttgccttgaaacttaatggggccacgtgtgtttccatgaatgtcattctctttggccaactcccccggcagccccaggagctccttttcaggaaaaggaagaaggtgtttgcttagcatctagtatacgagtccttgttggaaaggtgggattcttgtttctccttgggtctcttttaggctgagatgtggtcaaggaaggcctgtggtgtggctcgccttttttaatgctcgtctctggagacctgagttgctgctgactcccagcttgccccttctgtcccctggccatttctgtgtcggggtggctgagacactattgcattggccactttgtgttcccactagcccccgcccctgtaggctgtcattgtgatggtgatggggccaattcagctgcggtggggaggacccactgtgtgcgcctggggggtggcgtggggcactctgggatgagaagatgcgacttctgccctgagagccctgctttaatggaaggcgggggcatagttgcaggcagaagccatcaagcactgtggtcagaccagcattccatgtcaaaaatggccttgttggccgggcgcagtggctcatgcctgtaatcccaacacttcaggaggccaaggcaggcagatcacctgaggtcaagagttcgagaccagcctggccaacatggtgaaaccctgtctctactaaaaatactggctaatccgggcatggtggcgcgtgcctgtaatggcagctactcgggaggctgagacaggagaatcacttgaacctgggaggtggaggttgcagtgagctgagattgtgctactgcactccagtctgggcaacaagagtgaaactctgtctcaaaaaaaaaaaaaaaaagccttatctgggcctgggatctgtcctccgaacactgggtccactgtgctccacaaggactttcaccccggaagccctagacccacttgggcaaccagagtctctgggttgaccactccccagccctggccagcctcctgggccaccgtattctcccaacttcctgttgtgccacggctggtccaagctgctcttatcagacaatgcgaggcacttccacaggaggggacaaccccgtccttaggagccccttctccctgcccccaggcctggtgcagtgtgtggcttccctgccggtgtcaaaggtctcaaggcccctttaagaagcctgtcaccaccaccagcagcttccgttatctggttcttctgtacatgtaagcctttcccatacaccccggatgtttagggcttccgccctctctccctggccgggagtgtgggaagagggctttatttcaatgcttgagagtagggtcaatggccagggtaagctgtgggggctcctccccgccggcccctctctgcagccctcaccttaacacagagcatcgataccacctgggctttgggaagacctggaggctgaccaccctggaggctcccagcgtcccacagccactctttggggaagaggcttcctgagggacttgtggcccttggctgggactctagtcccagagttctgccttccggcgccgagctttgatttgtttattgagtgccagcccggttcccggacaggtagggacctgttcccggagctcagcagagccttgggaagctttcccaggagggctcccgagggtggcggccatgcccagtccgctgtacgtgtgagtttgtttgatgaggaattggctgggaaggcgcgggtctaattacaggcccatgagggtccctctcgcccccacccaggaagcagcggagatcctggcacactcagcacctgggcctgtgcctgcccagctgctggtggaatcatgggagccttgctccggggcctgtagagcagcagtgggaaccttccccacctcagcccctcccagagttggctgttcaaactcgccgccgctcagcctcttcctcctctctttcatcaaccctgggaatcgcacactgcccaccccaccgggccccggagcgggtgcaggaagagagagcttaacacccagaggtctgggccttctgcaggcgcctgagctgctgtggcctgagctgggttccctgctggaaccatcacagtagacctaatgatctgcctgcaggagttgcttcatcccagccgactccggggctgcgggaaggggctgggccttggttttgctgggggtggggggtcagtgcaaagggcctgaaaagtggcagaggtgatggcccatctgtcctccccctggccggccggcctaaacgcgattggctctctttcttttttttttttccctcccttttccctataaataacactaaatgcgatttgtcaatgcattcatttgggttcagtagttggaccatgggcagaagcactccagatttgtcactttccctaagctaagggtggggaacaccctctgtgagatcttggctcctgagcgcccaagactgctcttggaaccccaactctgggtcggtctcaggggactgacgttgatggagttgctgacattgacctccggcctctgcatggccttcaggaagggggcccttcgctctctgtcccgtcgagcctggctggcagcactcccttctcaggcctgtgcccccggcagggcctgctgcccccgccctgctctgtgggtgccaggctccaagcaccaggtgactcggtcactgaatggtcactgaacagtcatccttgctggtgtccccagtggaatgtgcatggacgtcctccctcccccagatccttgtcttttatctctcagcctttgttccaggggccaccacaggaccaggaggtacgcagacgtgggtggcacatccactgggcagattcagccctgaacctgcacgccccctccaagggggcccccagcgggcggggttgatggtgccgtctctctctctgtcactagaacggacatgaggattgtgtcttgtcgatccacgtcctgagttcccagacgtcataggtgcttgctcaacgagtgtttgaatgaatggtcagcattgtgtgaccgcagattttcaacttttatccaaatagtttgtggtttctgtgaggctatcccgagacagtctcacaagaatctccattctccctgcacgctccgcacaaggtctccttggggggtttttcagaaaaagggccaaagagcagcatttcctcggggatttgaacacgatctcccccggggcaggggactgccctggaagattcccggcaccgcttcccatgcgccacgtgactaggagggtcttggggcaggatggtgtcttttgtgccttgtgtgctggggccggaggaaacactgcccgtggccggtgtcatctgccagccctgaagactaatgatgggctggacagtggccccattgagtgggagggagaatcgctgctgtctgtagctggggggccgggtgggtgggagccgaggccagggagaacagcgcagacctggcacggagaggcctggaggaggagcagggggtctcagccacccagggtgcagggacgccacacgaggagcaggtgtggtgtgcgtcctcctgcgggttctccacctcttggcttcgttacctgcactaggctttgtggtgagagggcacagagtggaggaaggtgccgtggctagggcaggccacacgctgtgctaatggattgctgttacctgtcgcctctgtggttttgctgtcaggatcctccagcaccaggtccccaccaccaggtatgggccccacaggcactactggctccccgaagccagggacagaccccatagacaatactgagtccctgcagccagggatgggcccccacggccagtaccagatctcagggaccagcaccgggtacccacagccagggacaggcctccatggccagtaccaggtctcagggaccagcaccgggtacccacagccagggacgggcccccatggccagtaccagatctcagggaccagcaccgggtacccacagccagggacgggtccccatggccagtaccaggtctcagggaccagcgctgggtccccacagccaaggacaagtccccacggccaataccagatcccagtgaccagcactagatgtccacagccagagatgggcccctatggccagtaccaggtctcagggaccagcgctgggaccctggatgactgaaggagggcacggttgactaaagctgcaggagccagcctggccatcctgaggcactaagccatcactgcggtctcaggggactcagactcctctacttgtcttcttgaattctggaatcagacacacctgggtccagcctttgcccccggggctgtgtgcctgggatggttgcctcacctccctgaagctcagtgagatggggacggctgcacagggcccggcacagatggcacccgatggcacagggtcacctgcttgcatccatacagcctcggccctcgctctggctgcgtaccgagagtcccatgcccagacctctgctgagtctccaagctcctggtcatgcctcaggcctcccgtgagaagcatcactgcatggaccatgcctcgggacctcaccttgggctgggaagcttgctccatctccccaagtctcccctagaggcgccccatgtcccatcactctcactgcttgaggggtcagataggggaacccagtgtgggaggcccagaggtgccggagcagacgttaagcgagttccgtgtttatgcgctgggccttggcagacaccctgaatgagcctcttccccaggaaggagattggggtcccagtccaagttgtggcctcaaaccctgtgaccaagagtggagaaaaggcaagacccctcctcccagtcttccagaacagccgatagtggtggaaacatggggttcacactgaatttccttgtaacttgttgaagagaatttagcccacattttcaggggtggaggtctggccgatttggcagtgtgcccgtccccctggccacagtttactctggaccgggcaccctggtgccctccctcagtgacgcagtgaagtcactatgacgtgtttagttggtgagaaagtgcctcctgtaatgttttactcttcttagagggtgaataagccttgtttattataaataattatttacagaatacatgaggtttaacctaactctgggccacggcagcgtcccctgggtaaacccacgcgccaccctagctagagcctgtgcccccacaggcttcctggactcaccctgaaggggggctggattttctgcctgtcccgatgagagggctgcaggacagtccccagcgagcccttctgagggctgtaacctcttcccctggtattttcctgctcgccaggaatgtttcaagcttccagcagaagcctacccaccatagtcgctttccaccctgctcaccatccctcctgccctcactcattcagcagaccccgtgcacagcccagtgcaggactcagggtgggaaggtgtcccgggtgggctggagcaaggttcccagccagggcggggtcccaaggtgggtccacagccaggactgtgatttgggaggcccctccctgccttgttccagccccggcaccgccgctgtccttgtgctcagtggagactcactggctccaggctctaaaacctcagcgaggtctgcagacagggaggagccccactcgagggtagagtgactgccgggtccatttgcctgttacgaaccacgtggcctcagacctgccattcctcctctcctagagctatggtcttttgtctgaaaaatggataatgatggttaccatgtcagggaccattttgaggacaaacggggatgaaactgaagaggctcagcacggaacctggacacagaagtgctaattgtgtgttaccagctgcggtggctgccaaggcccaaccacatggcagccacgggctgagtggcgggcgggaagtggggagcaggagcatgcaagatgggcattcctgaagtttctgatccagtgagataagtacacacccagctctaagatggagtgtcccaggaaggtggagactgcaaaggccttgtggcgcaggagtgtgagctgcacctctgggctctctagaatttcaccagagctcagggaggaggtcagctcagatataggggcaacgggagagatgggagtgagaaaatggcttggcgtctggaagtggagcctggaaaggtgggcgtggggacagaggagggccttgggggccatgggcccatgcgtccaggaggtggaggcagtgaacggggccacggtcggccccacacgtggcaccaccagccctgctgagcctgcacctgctcctcaggccccctgagtgccactaccacctggcaccccttggtctgattcctgcttcctgcccgcctgggaagagtgagaccacttgcctaaagtcccttagctgtccttaaccattctggctgcctcctggccctgtccagggttagccgttgacctgaactgcctggtgccacctccccagactcctggggccttgccctggcaccaacagccacctccatcttcatcattcactcgcacattcacccagcagtgctttttgggcatccactcagcaatatcaaggcgctgagatgcggctgtggttaagacccgggcccggtctgtgaggacctcgcagttgccatttccccagagcacagccccagccaggcacactgtggggtccagaaagagaaactaatacattgtgttcgtccattttgagttgctataaggaatagccgaggctggggggttatttgactcacggttctgcaggctgtacaagtggtgccagcatctgcttggcttctggggaggccccaggaagcttttcctcatggtagaaggtgaagggggagctggcacgtcacatggcgagagagagaactcccagactctttttttttttgaaatggagtctcgctgtgtcagccaggctggagtgcagtggcacaatcctcggctcactgcaacctcagcctcctgagtagctgggattacaggcgcatgccaccgcgcccggctaatttttttgtatttttactagagatggggtttcaccatgttggtcgggctggtcccaaactcctaaccttgtgatccacccaccttggcctcccaaagtgctgggattacaggtgtgagccacctcacccagccctcccagactctatagcaatcagatctcccggactttgtgaccgtggggagggcaccaaaccatccatgagggatccacccccatgacccaagccccaccccccccaggccttacctccaacatcagggatcacatttcagcatgagatttggaggggacaacgtccaaaccatatcacacgtgacctctctgtgcgtgcgtcagtttctacatctggttaagcagtagaagctccttctctgttccttgttgagagagcggtgggggagaaatgactcagggatgggaggctggtcccccgaggggccctggtgtttgtggagtgggagtgcgggaaggcccctacgttgtgtgtgccgtgctgggctggctcctcacagctcaccgtggtgctccccgaggactgctggggaggaaagagctaattaacttggggacccagctgctgaagttatcattaaacttgagcagtccaggggcccctctccttctgggtcctatgtcacccagcacagtggggcttaattgaattttttctcatcccccaaggctcctggctggcgtggctggggtttgggatacggggagcgagagggcttgggcctcttccagatttggagtgggttcaccagaaatggcccaggaaaccgcgggggccacccccagcagctgggggctcctgtggtcatttcctcttggtcctgttgagcagccctggcccctggagccctcagcaagggatgtgggggcctgccaggccagggtcctcactgctgccgctatgcacagctgcatcttgcatccggggagtggggtgccgagtggggtgtttgggaggcaggttttcccttgtcccttctgcccagagaccttggggatgagttgagtgagacccttccggcttctgactggctgtgtttctgttgccatcccccactccttttaagtggaggtttatgacttccttctttatttaaaagggtcatttagtgacttagcagatcccagtctgtgttacccagggcccttttaaaaatctgtggggaggctgggcttggtggctcacacctctaatcccagcactttgggaggctgaggcgggtggatcacctgaagtcaggagttcgagaccagcctggccaacatggagaaaccctacctctagtaaaaatacaaaaaattggctgggtgtggtggcacgtgcctgtaatcccagttactcgggaggctgaggcaggagaatcactcaaatccaggaggcggaggttgcagtgagccgagatcacaccactgcactccagcctggacgacagagtgagactctgtctcaaaaaaataaaaataaataaataaaaataaaaatccatggggggacctctgtgtccattggctggtgtgaggagagggtgaggagctgcagagaaggtaccaggctgaggaccgcccccacccttgggctacagaattgaaggaggggacacatgaaagatgttcctagactcgggctggaggctggggacatccgagggcaaggacgacgctgtccctgctcttgtttgcagaggagtgcacagggctcaccagcttcttgttgctgtttaagtgatagctttatggagatagaattcacatactgtgacgttgacctttttaaaatctacagttcaatggttttgctgtattcacaaagtgattgtattagggtcatccagagaaacagaaccaatagaaggtgtgtacgtgtgtttagataaagagatttattattatgaggagttggctcacctcattacagaggttggcaagtgccaagattggcagagtaaatcagcaggctggagacacgggagagcccatgttgcggctctggtgtccacctgaaggcccaagacccaggagagccaatggcgtcgttccagtcccgagacccaggaaaagcgcatgtgtcagtttgagtctgaagcaggaaaaatctgatgttccaggttgaaggcggttaagcgggaagaattctctctcactcaggccttgtgtcctcctattcagaccttcaggcctttgtcacaaaattacaaagacctgatcagaacaaaatctgagaaaaaaccctttccttctatcggttttggattcattggctgggaccctggaaattagactgacagagattaacaggaaacaagcataacaattcaagtaagttttacttgacaccgagccttcataaggaaatgaagacccagagaaaccgttagcctgagcggtttttgttttgttttgagacaaagtctcactctgtcgcacgtccaggctggagagcagtggcccgatcacggctcactgcagccttgacttcctgggctcaagctggggcccagctgccggccccgggagctgctctgaacccactcttaagtcccagctcagactcccaagtagctgggactacaggcatgtgccaccccgcctggctaattttttattttttgtagagacagggtcccactatgttgcccgggctggtctcaaactcctgggctcgagcaatcctcctgccttggcctcccaaagtgctggggttacaggtgtgagccactgtgcccggcctaggcctgaacagtttttatttgttttgcttgttttttaaatttgtttgttgcttgttttgagcagtttttttgtttatttcttttgcttgtcttttgcccaggctggagtgcagtggcatgatctctgctcactgcaacctctgtctcctgggttcaagccattctcatgcctcagcctcccaagtagctgcgactacaggcgtgtgccaccacacccggctgatttttgtatttttagtagggatggggttttaccatgttggccaggctgttcttcaactcctgacctcaagtgatctggccaccttggccttccaaagtgctgggattgtaggtgtgagctgctgtgcctagcctaggcctgagcgtttttatgctgggtttgatgaagagtggaaagtcgtgggaaactgtgacagagcaacaaaagatgagctgaacagtgagcccgtgggggtctcggcaagacctgtgtactggggcccctctcagatcctctgtctctggagatgaggctgttcctttccgctgggtgtagggagggcacctcttacgtgaggggcttatgatctacttcagagaaggggcaggtcagtgagttcttcttggacctgccatttcttaaattccttcagctgaaaatatttactatgccaaggcactgtatcttggagtgtgcgttccaagccctgttgccttcaactgatcgggtgaggcccacccccatcagagcacacagtctgctttacccaggctcctgattgcacccttttcctgtttgccccgagaatactcaccagcagtgcttgtggctgcagcgttcaccccaagataaatttgccgggaagtatcttgcttttattattattttcacatcactctagtatatcgactttggaaacaaaagacatcattctgtttatagcattccatttttagtagtggtatttcctttaaaaaaaaatggtaattctcagctgggtgtggtggctcatgcctgtaatcctagcacttgggaaagctgaggcaggctgatcacctgaggccaggagttggagaccagcctggccaacatggtgaaatcccatctctactaaaaatacaaaaattagccaggcgtggtggtaggcacctgtaatcccagctacttgggaggccgaggccggagaattgcttgaacccgggaggcagaggttgcagtgagccgagatcgcgccattgcattccagcctggacgacagagcaagattccatctcaaaaaataaataaataaataaaatttaaaaaaaaatagtaattctcgatcgctgaaaatgtcaaatcctagagaacacagcattcctacaagtgatgttaacattgttcttgatcagttgttggctgaagattcatttgatgaatctgatttttccagaatagacgactcagatgactctgttgttttgcttagaaataactgcaggaacaatttaaaaaattttttttctttttaatttttttgttttttgagacggactctctctgttgcccaggctggagtgcagtggcacgatctcggcttactgcaacctctgcctcctgggttcaagtgattctccagtcttagcctcctgagtttagctgggattacaaggtgcctgccaccacacgtggctaattttttgtatttttagtagagacggtgtttcaccaggttgaccaggctagtctcgaacccctgacctcaaataattggcccatgtcggcttcccaaagcgctgggattacaggcgtgagccaccacgcctggccagtttttatatttaattttcacacagagcatccagtcagatttgcttcagcctcaaagagcgtgtttatgtaaaattaagtgagtgctggcagtgagctgaactttctaaaaggtaaaagggttaaatattaaactcatccaaaaacaccttcacagacacactcagaataatgtttgaccggttacctaggtgccccatagcccagtccagttgacacagaaatttttttttttttttttgagacggagtctcgctctgtcgcccaggctggagtgcagtggcgcgatcttggctcactgcaagcttcgcctcccaggttcacgccattctcctgcctcagcctcccgagtagctgggactacaggtgcccaccaccacacccggctaatttttttttttgtatttttagtagagatggggtttcaccgtggtctcaatctcctgacctcgtgatccacccgcctcagcctcccaaagtgctgggattacaggcatgagccactgcgcccggctgacacaggaaattaaccatcacagttacacagccatcgccattaatcccagcacatttcatcatccccaaaagagaccctgcccccattagccaatccccattcccaactccgggctctcagcccctagccaccgctcatctgccttcgtctctatgaattcacctgttctagatagtttgtataagtggaatcgtacagtatgtggccttggtgtctggctcctttcacttggtagaatattttcaaggctcatccacattgtagcaggtgctggtgcttcattctttttcatggccgaataatattccatcgtggatagaccacactgtgtatctcttcatctgctgatggacatttgggttgtttctgctttttggcataattctgttgtgaagaattctgcagtgagtgctggtctacaggtttttgtgtgaacatgttttcatttctcttgggtaattgcaagatcatgtggtttagccaaccagcctttaagccatgtgtctgctgagggacccaggcctggtgggggtgcattgctgtgcttggccagccaggtgctgcgagtccgtgtcgcagccatttctctgtgctgtgctctgaggttgtctcgccggcaccgggcactgtgagccccaggaggccaaagccccctttgttttatcttgagtccaggcctcgctccatgaactaggatgaatggacattgaatcaacgcagggatgggtggggctggggtggggacgcagagtgaccccgggggcctgcagctgggtcctggctgctgacttccagtttcctttgcctgttggagcccagaacaagtcagaaaggggaaatgcaaagttcgagtgtcttttctgtggtagactggcaggcctgggtgggtgagccacttgcagctagttgcagcgtgagagaggaagtgggaggggagggagagggtgagtttggtgtaactcacccctggaaggaggctgggctgaggctgggggaagtgacttttatttttctgagaggattcttccctggggccaacttcaaaccaagggagacaagaccttcctgggggaggctggaagtgctggggcccccaggtgggcaggtctcccagggccaacgtcttggggaagctataagttaccatgtttctggactgtcacacacacacacacacacacacacacacacacacacacacacacacacacacgagtaaactgtaacacaaatgtgtgcccatgaaagtgcccactttaaaccaccacacagcctgtaaagcgaaggccctggcccgcatctgggcacccactgcccagccagccggtaggcagtttgcactgtagtctgttaccatccctcagagatgcagccgaggagcccagctggcttggagggcccagtgggcgcagcctcaggaaagtggtcaggcccgggccaggccccttccccctcccagccttgggagaaattaccatatgaatgtagctccttcccggagttcgggctggaagggcctgggaggggacaggctcccaccccaggagcttccaggttccggctgctgcctgtgttagctgcgtgagcgtgagcgagccaggggtcactactgggtggaaggaagaagcgggcatttcttccaggaggtcaccgttggagtcccacagtaggtcaaccccaggccctgggtcctcgggaggaggagaaagaagagaagcaggaggtgtggagggtaggccaggaccagaaggcacacagggtcggggcagtgtgggagaccctgggggctccctcatttaaccagctaacatcacagcgttcataagaacacgctattactgcagttttattactttgctctgatttcagaaggcacaactgatgactttagggaacggagaatctgaggaaggcctcgcaggagagggtcagatgcgatcgagtaaatgtgagccgtctgtaaactgtagagtgcacgcacagcaccggtcagccctggggtcagtgttcccctggtgctcagctcggcctctgcaccttttagtgctcggctgggctctgtgggggtcagggctgggtctggtacattagaggacttctaccaagcccctggcagtgtctcagttactaaatccagtttgccagttactaaatccgctctgccggttcccgaatcactcttccgctggggccggccatgtcacgtcaggcttttcatgcaggacggcagatggatagacgctgggaccaagtcatccttgggccgcgagacgtctgaccttctgctggtgtctcagaagatgctagctctccgtggcatgtcttccacgcggtgcttggggaccagtggcctctaaggggcccccctgcctcagcgtggggagtggcctggccaaggtctcagtgtctggttggagccaggcataggctcaggtgtactggctggaggcctcctgcccatgggctctgcctgtcctgtgtccctggtccttactgtgtcttctgtgttcctgggagagaccccaggggccctgagcccagcactggggttggggagtgggcggggaagagggtggggattagggtccctggctgcagaacagccaggccccaagtccccactccactcccctcccaccgggcgcctcatcccacactgaccatttcctgaagaaaatttcctgaaccggcctcccaccccggctgtcccaggaagcccatccatccttccgccttaatgctttgtggctccagaaggatggtggaagccggaaatcatgagtctcattcacaggcggccacacaccgaagccgcggagacgccgtgggaaaggactctggccagcgcggccggcacagagggagcggtgttaccggggtagacgggaaccgtggctgcccccatgctggtctgggagagacgaggggccggacgaaaggacagcagactggccattcattcatttattcattcactcattcacagcgtcttactgggtgcttcggacgtgtaaggttttgtgggtagtgaatgcgacagaccccagacagcaatcggagggccacgtgtgtaagaactgagggacctaggctgggcgtggtgtctcaagcctgtaatctcagcactttgggaggcagaggcgggcggattacgaggtcaggagatcgagaccatcctggctaacacggtgaaaccccgtttctactaaaaatataaaaaattagccgggcgtggtggcgggcgcctgtaatcccagctactcaggaggctgaggcaggagaatggcgtgaacccgggaggcagagcttgcagtgagcccagatagtgccactgcactccagcctgggcgacagagtgagactccatctcaaaaaaaacaaaacaaaacaaaacaaaacaaaaactgaggaacccagtgtagatgagctatcccgggaaaacaagtgggagttctaggaacagcatggggaagggatggtcccggcagggaggacctctgtgggtagccttgttggaagagctgaaaggcagccagagaggctgtgcgtggatggaagctgaagagtaggttaggggcgtgtgttttgttaacaaagacttcaagcatttactgaccaggcacaacactatgtgcttcataaataaatatctcatttgatccccagcattcttatgagacagatgttattatcccatttcacatgtaagaacattgaggcacagagtggttaagttacttgctcagggtcacacagcacgtcggtggtaggcaggattctggagccacaggaatctggtatatcccaggtgcaatggaaaccagtcacggcttcatagagggaaatcatcagattagtaaattttacacacgccccctggtgctttgaggaggagggattcggacaggggcagctaatggtggtggctgtgagatgtgttgggttaacattgatgagagtttgggatggatgagtggattcggagtaatggaaatggagggcccaggcccggcccctggagatctagctgcaatagctgttggctggagaggctgttcacttagatgggggatggggtgggaggcaggtgagatgagagctccagagttcagcctggggcacggtcattgggttcaagatgccttcagatgttggggcttgacagtgacagtggctgcagatacccaggacccagcagagggcctggcacagcggggcccagggacacgtctgtgagtcaggctggcactcaagtgtgaatctggacaaagaaggtggcattgttggcattgaatgctcaggggctgggtgaagtcagctagggagaggggctctcaaggcaccaggactgactccgtgggtgagggcggaggaggagacggcagaggctgagagaatagccagagacaggaggaaggtcagcagagccatgcacagaagcctggagaagatttgaggaaaggaagggctgggtggtcgtcattccctgcagctaggaggcaagggtgacccctgtgtgtttcattcttcagaggattggtggctccatctggtcagaaccccaagtccagagatgcatctgagcttcatgccatggtgcaggcagcaggagccatggagcaggcctgcggggtcacggcctgcctgctgcttcctggtgtctctaccctgagctcaggggttgcttggatgccctgtgctgcatccccccaggcggtgttccagagaggatgaaagtggctatctcaaggtgtgaccaggtagcggtccatgcacactgctttttcctggggagagtctgggatggaagggtatgtgtgtgtttctgagactccttgaataggctccatgtacctatccacccatcttaccacccacccacccatccactcactcacccatccacgcacccacccatccacccatccactcatccacctgtcaacccatctatccactcattcacccatccactcatccacctatctacagtcattcactcatccacccatccactcatttacccatctatccatccactcatccacctgcccatccactcacccacccatccactcatccacccatccacccatctatctatgcactcatccacccatccactcatccacctatccactcattcactcattcactcatccacccatccactcattcacccatctatccatccactcatccacccatccactcattcactcatctgtccatccactcatctacccatccactcattcacccatttatccatccactcaaccatccactcatccacccatccactcatcatccgtccactcacccatctatccacccatgtatccatccactcatccacccatccactcatctgtccatccacttatccacccatctactcacccacccatccactcacccatccatctacccatcctctcatctatccatccactcatctacccatccacttatccatccatccactcatccgtccatccactcatccacgcatccactcacccatccatctacccatccactcatccacccatccacttgtctactcatccactcacccacccatccactcatccacccattcactcatctactcatccactcatccatctatccactcatccaccaattcactcatccacctatctactcatccacccatccatccagtcattcatccatttgctcattcatccgccaacccatccattcacctgcctgttcatccacctacccatccattcatccatctgtccatccatccacccacccactcacccattcacacacccatacacccatccatttatccaaccatccatccccatccttacttcagaaagcatttgaagttgctggggtgtgcacttggaaaatgcgtcataagctttcataggcctctctttggcttcctcacttctttgattggtctttctttcggacatgcaggattctgagcagctcttctgggaggtgggtgcagtccaggtaggctgcctgcaaagctaggaccgagggagccacatccaaggcactgtgggttcccaaggcgatggcactgtgggcccactgcttccagacctcctcaactcccaggctcctgagcaggaggactcctggggcagggcctggagacgggaagagaaaacaattccagtctctcaactcttgtcagtccaggtgggtgctgcatggattgggggcacctggaacagttggccccttcacccctttcccccacctttccagcccctctggctataatcagacagttgtgtgcgatgtctttctccctcctgaaggggtcatttagtcaggctcctactcatggcccaggaatgtgcccctccctgcctgtcccctacccccaagcaggccgtgcctccagccccctgctgtctctgaagggcctgggcatggggcagcctctgcagcatccccagggcccgagctgatctgcacagcagaagggaattgggggaaagctttttttctacccagcacctggcagggggccaccctgttgcaccccagagacccttgtctaagttttgttatttcagatgatttcataagttgggggaggcggagccccagcccccacagcccctgttgttgcctcactgctgagctctgctgtgtatctgctgacaggtctgctgatagcagaaggggctggagagagggaagctctgggccctgccctccccaacccctgcttaggggacatccctgataagaggaaattccagcctgtgacagatggccagtgtccacccacccacgggggaacttttctttctctttgtaagtttgcagatttgccaggaactaaaggaatctctggttgacaggccactgtggacatggctggagggctggcacgggctggatcttggggttgctttgaggtaggggccgctcctgctggaaggttccttggggtggggaaggcatcagggccattccctgaccctccctctgcagtggatccacttcagagcctgagacaaggcaagggggcagcagaaaacagaatataaaatagccccccccaccacacaccgcaccagaagtcagaggattcatccttggcctgccctccctgcagcctaagttctgagagtggctctttaggaagtgaatggtgatggtttgcaggtcagagcttgctctggcccaagattgatgtctcaataggccgcggagcctgggtgaaaaaactcaggctagggaggtggtgggttgcaaatgaaagaacagaggagggcctcttccagaaagcggcgggtggtgtgaggagcccttggaccttgtccaaatttgactttaccgactggggccaattgaaaccgtgctggcagaaaggcaaaactgcttgagattccttcctccacaatagaggagaggtttgcttgaaagggtttggcgagggaaaagctggaggaaccttggccggcagtaaaagtggggacccccgccccctgcctcgggggcgcctcggcccctgaatgaatgaaagaggaggctggatggagacagactcacaccacctgtcccttccaggtcctgcaaaggagcacacagggttcttgttggctcttccaccttgttagtcaccaagaaggagaaaacaccaacaggggaactgtaaagctgcagttttgtttaagccccatagtggaaaccggaaagagctccagctcggagaaaaatgcagctctttgcctttgcaaatccgtgtctttctctgggaggccagagccattgtgctcgatttctaagcagggtttcagagtgtctcaggaggggaaggcagagtctcagatttccggcatcccaggtcctaaccaggctttgaggagacgcttcctgtcccatacaaagtgtgaagtgtaatttgatttggagttagttaacaaattagatgagctgtgtgcattttaaaaattcagtccttgatcccccacccacacacatttgcacaatttggtcatttatattcagtgtttccatctttagaagagaacaggaagtccccagtgacatttatggagtgtttgtagtagcttgggtaggtcagtaggaacacaatgcagtgaaaagcagagttgagatgggaaaatatcctgttttcagagccccccagggatgacattccttatcgtctctgtccacccgctctggagtccactccgcaaacagcaacttgttctcacttgagagcttcctcctgccggagctcagggatggagagcagctggcctcagtcttctcctcttacctctttgtttctcagactcatcttccaccttgaataattgtttttaacctgctctccctcttctctagctgtagaacccagaactttgtgtgtgtggtcaaaagtttagagagtgctgcaggtaatgctgagataaccctattaaattctgtaagttctcatcacaccaagtttgtttgttttttttaattctcattttattttatttcattttatagggatggggtctcgctacgttgcccaggctggtcttgaactcctgggctcaaacgatcctcccgcctcggcctcccagagtgccaagttatttttttaactgggatccacgggcctagggattctttgatgaaccgttcaaaatacgtgtgtgtctgtctgtctgtcttcaatgtatacttttctagggagagtctttacttttcaccagaggtttgtggcacacacatgtcctgtactactgtatcagattgtgaattccttacatgttaaagactgcttcaaatctgtccggaagtctcggctaataaacatttaaataaatgaacttcaaattcccatgtgccaccactgttttcattctgactactctcaagcctgtagtgtcatctttttgttactgtgaagtagacactcaataaatacttgtcaaatgaatcaatgttatggtcctggtccactaggaccccaggatcatcgtctaccattattgtctatagtttctttaccatcttgttccagagcagttctttctctgaggtctgctcacctctgcacgtgtgtctagtttccagccctgtcgccttaccattctctttcctttacctgcatttcctgaactgttaatagttaacaatagcttctccctccacccactcactcatacctgaagtgagaagtcatcattgaggtctctgtggattttgtcagcccaacctggggcggcctcctggaggtggagttttcagatgagggatggacattttggtgtctgctgggtagatctacctgggagctttggcaggggccccagggcagctctgcctctttattttggctgtgggacccctggtgcactagggtttctcaagtaagcatctgtgtcctgggagagccataggcaggcctgagagggcccctggaatctgggacccccagcccggcccagtagctggtaccatcatctttcttgcaagggaagttatggaaactaagatgctaatgtgctttgataggcctggggtggctctaagccctgggaagagccctggcaactttccctggctggcgggtagaatcttctcctggcagttcagggctctgcctccagctccctgggggagagcaactgagggaggagctggaggccaaggcctcagtgctgagctgcctgcaccgcagctgcaccttctgggtcctggctgcaggaaccccatacttctccagcctttccatggttcccgaagacctggcctggggagggggtcagcagcctggggctcacctacctggcttcaaatcctggctctaccgcttactcgctttgcgaccctcataattgacaaaagccctctcggtctcggtttccttatctgtgaaatgggacaataacagtggctaccttataggattgtgtgatgatccatcagttataatagctcctgagcagcgtttagagtaacacctggggctcggtgcagtggcttatgtctataatcccagcactttgggaggccaaggtgggaggatcgcttgaggccaggagtttgaaaccagcctgaccaacattagtgagacccactctctaaaaaaaaaaattagagtaacgcctggcacagagagcccccagtaaacctcggctgctgtgatgagctttgtttcttcatttgttcattcattcaccagactttttgccggggcttgccgtgagccctacgctgctctgaagaaagccgggctggggtgagcgtgatggatgaggtgtctggcttcacaaaccctgtgtgggggggttgtggtgagaggaaaccgcacacatcattattcagttaccatcgtggggagactgtctggacgcagagagcaggctctgtgtgggagcggggagggcaagccctggttgcgaggcagggcttccccaggattcagcagggatctgaaggactttgcaggcacccagggagataggagaggaggagggagcagccctggccggacactgtcctcctagcattgcctgcatcagggactcactcagctttaagaagcccctttgtgggggacagggagcatctgttagtttataggacctgaagtgcccccatgggctcaagtttctgggaaggcctgcaggtggccgtagggctgccgcaggggtgctggccccagggtctggattcaggggagcctgcagagggagggcagctggaggctgctccagtgtgcattgttacgaggcaaagtaaggagactgctgggcccacgctgggccggggtggatggaggcaaggaagtcttcgccggggcaagggcaccagctgtagatgccggcagctttctcctggacacgggcctggaaggctgacagggtgtggtgagtgccaccggctcccctgccgtggcctggtcagtggcttcacaggcctccgtgggcaggaggaggatgaccttgcattctgcttggccaccattggcagtgacagacaaggtgtgtggggatgtggccatttcggtccgtgctctgagagccaggtgtgggttgggtttggggaagacaggggaatggcattgacttgaccctgagcactttgtcctggggtgcaggcccggctgtcactcccctggagctgggaatggcattgggcggtggctcagggtcccttgccccagcggcaccatctctgcatttggccagcaaggctgatgggacttgtgtggacatttctgggacgtagaccaggcagcatgacacacagggaggggtaggcagagaagggcggcccctgggtcttggtttccaagtcaggctttgcaagcctgctgtgtcaagccctctctcggcaccaggccaggtgggccagggtcagccctggggctgtgatgagtgtgagtgcccctaaagtgtgtcatgtccaatagctgcctcctctctgggcactgcctcccagccagatatcctacagcccccgtcccagccacagacagcaatctgattccctcatcctcggcaggtcctggggttggggtaagaatttgtcactaagtgcagatgttcccagagggtgctggctcagggctgcgtggattacagccctttcatccctgccttagacccacctgcaactctggagaaaagatggcccagtggacgcctgcggggaggagggagctggtccccaggatgagcagatttgggggcagtccccatcacgggaccggtgacctactgccaccagcgccagtgaatggcagaggggccctggcataaggcctgggttcagaatgggaacctgcagagaaactgtcaaggtctcccgccacctgacacctccgcctggctgccaccctagaaacacccttgctgcaagaagatgggggagtttgtctggggcatggtctggcgacaccaacttgagaacctcaggcctaagtgttggcctctgggcctcagctgtcctctgagctgtaaagctggctcctgggcacttgtggaaaacactggactctttattttattttactttacattctgggatacatgtgcagaacgtgcaggtttgttacataggaatacaagtgccatagtggtttgctgcacccattggactcttcaatccagctccactagaaatgactgccttctttcccttcttccgtccctccctcctcccctcccttttttccttccttccctgtttccttccccctccctccttcccttctttcccttcctctcccgtcctcatggggatataatttccatattacaccatccgccgattcagaaagcacagttgagtggcattttttcacaaccttctataagcatcacctctaattccagaacgttttcctcaccccaaaaggaaacgccatcctcggtacacagtcactccccctcccccagcccctggaaatcaccaatctgcgctttgtccctacagatgtacttattctgaacatatgactagaaccctaaaagatgtgactttttgtgcttggtttcttgcagttggaatgttttcagagttcatctgtgttggcgcacgctcgtgcctttttatggctgagaaatagtccgctgtgttgactcagcacgttgggtttctccacgcatctgttggcggatgtgttagttatttctggagccgggtgtgttgtgctactcacgggctgcactaggagctggggatatcactgagtaagccacagcctcgggcacccaggagctcgcagagcaggagctgggagggaggtcaggaggtgcatggcctgtttgccaggctggagagacttgcaaaaagtcactttgagccagaaaccagagcctgaggcctctgactcccagctgcggagccgggagggaagctctgcattttgctttgactgtggggtgacgtgtcagttactgtccaaatcagaacctttctgagagtcgacgtgggtactgctgataattagtctggatacccgaaagaatggaaagcagggacccagacagatccttgcacaaccgtgttcgtagcagggcgaggcctggaggtgcgatggggatctcaacggggcagctgccgtcttgctggagcccacggtctttggggggggtcacaggtgttaaccgcatatcatacaagcaggagtgtgaaatttcagggttgccaaattcagtgagggtcttgtgctggcctggccacttacagtggcatttcaggaaaaaaaatcactctatggacctcagtttccccattagtaaagagtaggttggactggaattctgtaccatccagtatagttgccatttatgaaatgtggctatttaaatttaaataaaaatagaaattccgttcctcagttggactagctcagtgtcaagtgctcagaagtcacttgtgaacacactgtggcaattcctcaaaaaacgaaaactagaaccaccgtagcatcccataattccacttctgggtgtggattcaaaagaatgcacagcatcttaaagagctagagatatttgtacacccacattcatagcggctctgttcacagtagccagcgggtagaaacaacccgaatgcccgcggtcaaatgaatggagaaatcaaaggcgggacaggccgggcgtggtggctcacgcctgtaatctcagcactttgggaggccgaggcgggtggatcatctgaggtcacaagttcaagaccagcctgaccagcatggagaaaccccgtctctactaaaacaaaattagccgggcatggtggcgggtgcctgtaatcccagctacttgagaggctgaggcaggagaattgcttgaacctggggaggcagaggtttcggtgagccgagatcgcgccattgcactccagcctgggcaacaagagcaaaactctgtctaaaaaaaaaaaaaaaaagggtggaacatacaaggaatttgactcagccgtaaagaggaagttaggatacctgcaacagcaagggtgaacctttcgggtattacgctaagtgaaataatttggtcacaaaaggacaatcctgtaggattccacttataccaggtccgtagagtagtcagattcagaaaaacagcagaatggaggttgccagaggcttgggggatggggctggggagttgtttaatgaggacagtttgttttacaagatgaaaaagttctggagatttgttacacaacaatgcgaatgtacttaacaccactggactgcacacttcaaaatagtgaccgtggcaaacgttatgacaattaaaaggaaaagtcacgtggccagtggctaccacgctgagcagcgcaggcctcggacggtgtcgtggtcacagacaatggagtgggtgatctttaccattgtttccagctgtctgagcaccatggtgtcctggggccaggatgaaagtgtctctgggtatgggggtctctgcttttcccacttgggagtcctgaaggcagaccccaaagctcacctggccaggtaggagagcgaggcgggctcttgcattgctctctgcgtgcgtgcctgcctgcgggccagccggggcctgcaaggccgcctctcgagggaggggttgcaggaatggctctcacctgtgcagaaggcaagccactgccctacgtcaatggcaaagatggggctcggctgcgttgtattattatttctcaagcggggcccctggtgggcaggatgtttggtttgatttgagtttctgcagtgagtgctggtgcctgtggagggacccagctgcagctgagccggcccctccctcgctctgggctccaggggcgttgggggcgagaaaggagagttcagggggcagcgcctccccccaggtcctgctggggagggttgagggatgctggggggaggtgggggcgggtaggggctggtcccagtcccaggcaaaatggctctcagacccacaggcagatggaagcgattttcggtcacgtgggtggggactgaactgctgccccgcaaggcaaggccccatgtctggcttcaggaagcggccccaaagccacatggtccatggccagatgcagggctgtgtctttgtttatttaaaggtcctggaagcccaggggagagtatttctgaagggggagcaggagcaggagcaaagccctgaaggcttccaggctgcgtggcctgggtgggggccacgtgggggcacagagagaggagccctggcctccaggtccgcctgtgggtattgctctcagcagtggagatgtgtggacccccccttggcatttcccaacaaggaattatattgttcctttgttcccccaattccataagataggaattcctgtgccctgtggaggctgagaagacggggaggtgcctgtgaggataaaccagcccccagtttctggcttccagagtcttttcctctctcacctctgatgcctcaggcctggggagcctccctccgacaccctctgaccgctccagtgaaataggccgagagggatggcttgaatcggctggggatgcaggctgcagccagggggctcagtgggcatttcctgagttcggttcttgccccgcaagtggaagggcagttgaactgaagtctcccactgcccctcctggcctggaagcctgcctcccaccttctgggcagagtgaggagtgggcgtgggccgggagggctgcctcctgtctgggagggctgctcacttgcctgtcacgggggatgagccccctgcagcctcccgtgctgtggccctggctcccacgccggctccactcccctgtggctgcccctgctgggtgcccaccggtcccagggaaaagccactcccctcccggaggactggcgggaggggccctgcctgggagcgtgccgtgtggtccctgtcttagcgcaggatgcctgaggccagatcctccctgggaggcaggatggggcaaaagtctccccgcaggcagagcagggcctggatgggcccaagcagggacgggggcacagaacagcagccgcccagcctgcgtgggagctgagggccaccaagggcagctccagcctgtggggactagcagaggcaccacctctgtgaccagcgagttgtctgcacctgcatgcgcatgcaccagtgagtgtggcgagtctgaggtgtgctgggacctggcccgtgtaccagccagccctgatgggaaccagccccatcctgggtacccctggaaccccactgtgtgggagcacctgggtcctcagcaggcgtcttccgggcgtccgcccccagccccaggcctctgacccgtgtgtggtgtcttaacagcagccaggagcagggccatcgaagggacctacagacagaagaggctttagtgatttcgggaagttcagctccacgtgccccacatacccaagagtaaaacttggtcttggcctgtgggtgtgcagcccgtgggcgctggccaggcacacaagacggccgcctgggtcagtccagggggaggcagatgtggtgcaggggcccccctcctccatgagcccaggaacagctctgcatccaggcacccgccctgcacccagcacttttccttctcccaggactgctggctcgttctatgggattgaacacacaactccatggggaccgacgctggttctatccccctttcttacaagaccatccatggggatgtgggaggcggggacacacgctggttctatccccgtttcttacaagaccatccctcctgtgtcttggctcgtggatcggcttctaaggcctttgagtggcagcaggcggtacagcttatctgagtagaggtgaaggagagggccaggtccacctgggtggcccgaggcagtgtggagggccaggagaggagagcaccctccacccttgtctgagcagccctccagggtacggagacaggagttcagggtcagccctgccttggagcgcagggggcccccagcttggcacagctcctagaagaggagatgaaaaagcctggccttgggagtctggggatggagctttgctggggaggcagcgtggctgcaggatggcagctttttagaggacaccacggccagggacatccacccgggggaattctcaggggtcgcctgggcaagtcgcttagcctttctgagcctcagtgcctcagtttccccatccaaggatgggtgtgacaaccacctggcaggcgcctgtgtgtgagcccctgttccgctctaactcctctgctgttccttccccagccactgaggcggctcccagctgcgttggcgacatggccgacacccccagagatgccgggctcaagcaggcgcctgcatcacggaacgagaaggccccggtggacttcggctacgtggggattgactccatcctggagcagatgcgccggaaggccatgaagcagggcttcgagttcaacatcatggtggtcggtgagtcctcaccttgcatgccactcaaccaatgccggaaaccagcctcagcccccagggcggcccacaagcctttgggcttggtcttcccttctgtaaaatggggcagcaaccctgacctcaaggacggattgccagtgacattgcgtgtgcatgcatgcgcctgggaggagcccacagcctccagcggctcctcagaggggcctgtcctgcacatccagggcccctgagatgactttggggagcccaggccggcctggagcaggtcctgatgagtggtcgctgcctctgagcaatgacgtcagcttgtgcagagggttctgtggcagctgtcccctcactgttgctccagcctggccctccaggctccccaccgcaccccaccgcaccccggccagaggcttcccagcagctcagcttcagctctgccctggaattggggcctcgtggcttccacaccccctggtggccccggagagctggaggtcaccacgggaggtcgtcgatcagcacgacctgggcagggtgagggggccaggctggagtctacagtgggccgcctgttgtttccaaagccccccaggtcccattcaaacctcacagggaccctgtgaagggggcgtcccgttttccaggcagaagcgaggctcagggaaggctgccaaggttccttagctcacagggcagagaaccgcagccaccgttttgactcccagaactgtgttctgcccactccacggggtccagggaggggtctggggaagtgcccccgccaggtcacaccctaaacaaaggtgagcttgcggggtttctgcaaggtgtctgggcacctctcaggccgggcctgtttctctgacctttgccagccgtgcacgtccttcctgcccagctctgtggacgcaaacccacacctgccagcccgacacctttctttcctcttctgcactgatctgggccctggctcccctggggtcttggtgtcctctctgcttcctgtagcctcatgggacccggctgctcatggccctgctgtgctcacagctgcctggaagctggcagcctgcttcaagggagggcggaggtgtggggtcccctcctacggcccccaccctgttctgcctgttgtgggggacgtgcttgtaccctgaggattcagggctgcctcccgggaagatggctggagagaaagagaggggagaggcccaaaggcagtggccaggctgggactcatctctgtgggctacggaggggctgccctgctccctagccagggacagggtgagaaggacctgggaacctctgcgtcccagccatggcacaggccttcttccggagctttggccccaaggagagggagaggcagcccagcagccctcgccttccgtggctgccactgtgacagccttgccctctgggaatggtgcgcaggaggccacttcacctgtctgggcctcttcgccctttcaaccctgagaagaacagtggtcctgattccccacaaaatcactccctcccagggatgccgagtgaggaacaagacgtggggcagctctgctctcctccctcctccctcccatggcagctgtgcccacctgcagaggtgcaggcaaggtggaggggcacctgtttggaggtccacagaccccggggagaatcccagctttgtcctaactcagcggggtgaggcttgtgtgtcttcccctgggctcctcctctgtgagccttagcttcctcgtccataaaatgggatcatcccataaagtgagatcaagcgagctaggccccgggcagggtccccaacaggttgtggttgttcgagaatttgcagcagtggtgatggtggttgtggtgatgaggatgatgggggtggtaatgacggtgatgatgatggggtgatggtgctagtggagatgatggggatgatggtgatggtggtggtgatagtggtgggatggtagtggtgatgtgggtgatggtgattgtgatggtggtggtggtggtgatggaggtgatggtgatagtgatcatgagggtgatggggatggtggtggtggtgatggtgacagtggtgggatggtagtgatgatgtgggtgatggtgatggtggtgatggtggtggtggtgattgtggtggtggtggtgatgatggtggtgatgatggtgattgtggtgatggtgatggtggtaattgtgatggtggtggtggtgatggtggtgatgatggtgattgtggtgatggtggttatgatggtggtaattgtgatggtggtggtgatggtggtgatggggatgatgatggtgattgtgatgggggtggtggtggtgattgtgatggtggtgatgtgggtggtggtggtgattgtgatggtggtgatgtgggtggtggtggtgattgtgatggtggtggtggtggttgtgatggtggtgatgtgggtggtggtggtgattgtgatggtggtgatgtgggtggtggtggtgattgtgatggtggtggcgatggtggttgtgatggtggtgatgtgggtggtggtgattgtgatggttgtgattgtgatggtggtggtggtgatggtgatgatggtggtgattgtgatggtggtgatgggagtgatgctggtgattgtggtggtgaagggggtgatggtggtgattgtgatggtggtgaagggggtgatggtggtgattgtgatggtggtgaagggggtgatggtggtgattgtggtggtggtaatggtgatggtggtaaaggggtgatggtggtgattgtggtgatgtgggtggtggtggtgatgtgggtggtggtggtgattgtgatgggggtgatgatggtaatgtgggtgatggtgattgtggtggtggtggtgatggtgatgattgtgatggtggtgaagggggtgatggtggtgattgtgatggtggtgattgtgatggtgatgtgggtgatggtggtgttgatgggggtgatgatgttagtagtggtggtgatagtgatggggatgatggtggtgttgatggtgatagtggtgggatggtagtggtgatgtggttgatgatggtgctggtgctgatgattgtgatgacagtggtggtggtgatgagggtgacggaagtggtgatgatggcgggagtgatgggatgatggtaatagcagtgatggtattgtgatgatggtgctgatggggatggtggtgatgataagggtgatgatgatggtgatgataataataaaagtaacaataataaagggatacaccttgcagtatcccagttggcatctcctagatctaaggtgtcgtggctggaacattgacataactcctgacctgaggttggccaggacacagacctggtggacagagagagatggacgaggagtgtccgtccttgggctactaaacagttcaggccagggattcccagcaccagcctctgtcctcccaggagcccacacttttcctagaaaggtgttatcaaagtcagaacatcagtgtaatttagggtgttttttgtgttgtgtttttttgagacagggtctcattgttgcccaggctggagtgcagtggcatggtcttgactcactgcagcctccacatcctgggttcaagtgattctcgtgcctcaggcatgtgccaccatacctggctaatttttgtgttttttggtagagacagggtttcaccatgttggccaagctggtctcgaactcctgacctcaagtaatccaccctcctcagcctcccaaagtgctgggattacaggcgtgagccatctcgcctggccgatttttgtttttttaaaagacagggtctctgtcactctggagtggcaatgatcctagctcactgcagcctcgcactcctgggcttgagcaattctcctacttcagcctcctgcgtagctgggactataggtgctcgccactacacctagccaatgtttacattttgatgtagagacagggtctctctgtgttgcccaggctggtcttgaactcctgggctcaagcaatcctcctgcctcagcctcccaaagtgctgggactacaggcatgagccaccacacctggcctagggtattttttttggtgtgttgctagcgtagcccaaggcagctctgtgcagggtaaagcaatggggctccgagtctggaggggtgtgtgtgtgtgtgtgtgtgtgtgtgtgtgtgtgcgcgcacgcgcgcgcgtgttatatgtgatttgtttgtgtgtgttgtgagagttgtgtgtgaggtatgtgtaagaggtatgtttgaggtgagttgtgtgtgtgttgtgagttgtgcatgtgaagtgtgtgtgttgtgaggtgtgtgtatgaggtgtatgtgagttgtgtgtgttgtgttgcatatgaatgctacttcctcatcctcgtttgtctcagtcacctgtggactggctgtctgcacacacggtcactgtccctcgagtggcaccaccctgcaggccagcgccccctagcacatggccccacagaccccatgggacatgcgtgagcctgcctgatgctcacaccagctccacgggggaaggactgtttatcccattttgcagatcaggaaactgagacacggtgaggtcaggtgacttgcccaggccctggccggtcagggaggagcagtttgaacacctgggctttggttgcaaccaccctggtgaactgcaggaatcccggccacctggtgcaccctgggcagccctgggctcctccgccagcccggcctctgtcctgtccaaaatctgagccaccaggagacctcctgtccagaaagcacaaggggcacaagagatgccgactctcccaggcccggctcacctctcaggagaggactgtggcctgggttgtgctggcatcagagcccggctgtgtgggtttacacagtcactggacacccggctcgagggtgaagtcctcgggggctgcttggcagggatattgccgggaggtagcccaggcactgctgaatctcagactggagagcctcgtgcctgggtgggaggggccccatgtgcagaccctgctggtctctccggagagacccctgaccggcctcccatcctctccccagggcagagcggcttgggtaaatccaccttaatcaacaccctcttcaaatccaaaatcagccggaagtcggtgcagcccacctcagaggagcgcatccccaagaccatcgagatcaagtccatcacgcacggtcagtggccgggagtgggctgggggtgcaggacgcccctgccttcctggagcacaggggttgggggtcaagaccatcacacacagtcagtggccaggggcgggctgggggtgcaggactcctctgccttcctggagcacagagtggggggtcaagaccatcacacacagtcagtggccgggagtgggctggggatgcaggacgcccctgccttcctggagcacaggggttgggggtcaagaccatcacacacggtcagtggctggggatgggctggggatgtgggatacccatgccttcctggagcactggtgcggtgtgagggtgcccgagtcaggcaatcccaggtccccaagacggggactcgctgtgcccaccatccccagcatgttgagcatgttggggctctggctgtgatgggtcagtgtcccggacccctgtgggccccgtcacactgagctccccacagacaactgagttttccaccaaaagtctgacaggcaaggggctcccaggggaaccgtcaccggcctgtgccggagttggctgaggaaggccattaatttcccggtgtctccttggttgtcatcgctgcctacctggggttgccccggggtcagtcaggtgtggggtgtctgtgagggtcttccgtctcccctctgactctgcgtccgtggctctgtgcagatattgaggagaaaggcgtccggatgaagctgacagtgattgacacaccagggttcggggaccacatcaacaacgagaactggtgaggcccctccagggggaggagcactagcgggggcttcagggctccctggaccccacccagagtcagccctagaggtttcccggcccgcgggggtgcagggcccacctcctgggacctgacatgctgccaaagccgcacgtctcaggggcctgaaaattctggaccaaagcagaattacctggggaatcttgctgtccccaactcatcacctgaggccagcccggggaggctggtttgggaggccgagggtaaggctgtggcatctccgctcagcaagccagacctcccagggcatgcatttcattggaaggtggggtgttgggctctgagtcctgggaatgcacgacctgcttggggagggcatctcatgtgcctgctgactcgtccccatcccccacgcagctggcagcccatcatgaagttcatcaatgaccagtacgagaaatacctgcaggaggaggtcaacatcaaccgcaagaagcgcatcccggacacccgcgtccactgctgcctctacttcatccccgccaccggccactcgtacgtccctgcagtgtcggcgtcctcatgccgggtgccctgggttccctctgtcccctgggactgcaagacggtgctgtctgccctgctgctgggtgcagaggggctgagtcaggggccatggccgccagctatgaagttgggggtgtgccatgtctgcacctccaaagcctcacactgacccctatgcaagtgtcctgcccagcccccatccttcagctgcgtcttggggagctgagggtcaggcaggccctgggctgttctggagcctggtggtctgtgtcctgccttctcaggccaggctctggcaggtggagtgggagcccccagccaagcacccgtagcggtgactgaccttctcatccgggccctgcctcatgggaccccttagagggtttggtgcgttcttagacgggaagcacagagatcagtgctggccccttccagggctggacggggctgctgttggtgttggtgagagccctttcctcccgccggctctgtccgcacctgacgtcgcccctagagatcagcaagggcgggaggctgcatgtaccctggcaggtggactcttcatggcctcacggaccctctgtcctcagctccctgtgcaccccctgccagacacctgtggctcaccctgagccagggctgggaggaggaggaccagaggccagcaggagtggctggtggaggcagccgtgggtggcttgtctgcatgggtgggtggagaaggtccttcgcacctgctgtcccagatgtacttccctgggcggaggaagcccaggggtttggggaaaccatactctgtgggcaccaggtgcaggaaggagcctggctggtgggcagcgggcctcacccagagtctgtgggaaaacccaagccggagttttcgagcccaccctctggcatcatcctctgtgggccagcaggagtcaggggcagggggccagcccgctgtccatgggcctctcctgaactgaacatctgccctcccaggcagaacggctcacctgcggtcctgtggcagctgttccagctgctccaagctttgcctcagctgaggctgatggcaggaggcagaagcctctcctgatgccagctgggcaagccgagggcgggcgggcggtctgtggcacttctgccactccccagcactgaccctttggctgggactccagctaggcatgttgcctggtcccgcccaaggcgtccagtcccatggggcaggggcgggccttggccatctctgcttaaacttctgcccggagcgggcttctccccagccatgtgtgtgaccgatttattctcactgtgggaaaagctcggctccagaactggggaagatggtgccccagttccagggccctgccagcccctgccacccacagctttccccacatcagaccccaggctcactggggccaagcaggcaaggggagcagcccgcctggtgcaggggagcagcccgcctggtgcaggggcaccgcacactggtgctagcttctatttctcttgcctctcccctcccagccaaagccccacagcaagacggctgctgagccaacgacagcccttctgtgtggacatgtaggggtgtggttgggaccccagaactcatggacgagggtgcttggagctggccctggcccgcctggcctgtgcagtggtgtcacctgtgtctgggacacacccgtgtccttcctctgccccacactcacagcgtggccgactcggcccggggccctgtccttgccagcagggacccccgtgagccccgagccagcacctgagagtgtcgacacctgcttgggggtgggtgcccccccactgccccgctcccccagatgagcctcacgcacatccctctgcttcagcctcaggcccctggacatcgagtttatgaaacgcctgagcaaggtggtcaacatcgtccctgtcatcgccaaggcggacacactcaccctggaggagagggtccacttcaaacagcgggtagggttccatctctacttgccccagcccttctgtgcaacctggagacgctgcaggcctggcaggggccaccccgtctaaaggagtcacactgtcagggagaccgaaccgctggtcactctccccagcgggtggctggcctggtggtccctggcccaggtggctgctgggggccgtccctgagatggcctctccagctcccccatatctcaaaagcagctttgtgggagtgccaattctccagcagagtctctgaggggggttttggagaagacctggaccaggcagatggtgaatctctcttccagggagtgaggccgagcaggggccgtgcgacatggcccaccttgttttatgccccccctttttttttttgagaaagggtctggctcagttgccaaggttgcaatgtagtggcacaatcatggctcactgcagcctccacctcccaggctcagtccccgagtagctggaattacagacgcacaccaccatgtctggctaatttttgtatttttagtagagacgaggttttgccatgttgcccaggctggtctctaacccttgggctcaagggatcctcctgcctcagcctcccaaagtgctggggttacaggcatgagccacctcacctcgccctgcctggtttttattagatggaagagaagctgggccaggtgtggtggctcacgcctgtaatcccagcactttgggaggccgaggcgggcagatcacttgaggtcaggagtttgaggccaacatgatgaaaccccatctctactaaaaatacaaaaatattagtcgggcatggtggcgggcgcctgtagtcccagctacttgggaggctgaggcaggagaatctcttgaacccgggaggcggaggcttcagtgagccgagattgagccactgcactccagcctgggtgacagagcgagactccatctcaaaaaaaaaaaaaaaaaaaaaagtttcaggagggatggtctctgccaccttcttctccgccaccgtctgaggcccctgctgtgggatagggaggggcatccaagcaagagggcagccctgggctcttcctcctgacagggcagcacatcagagccacatggggtgcctttcaaaatgaaaccgaggtgcctgggctgcggcaccacatctgcctcggtgggtgtgggtggggcctgtaacctactccgtcctggggccaggtgtcagggaccttcccagcatgtgcaggggaagacagtccacacaaagtgggtgtgtctgccggaggctacacacgggctgtggtctgtgcctgggcaggcgagcagccgctcactgggatgtttctgttgcacgtacccatgtcgggctgctggcagggagctgagaggttactgcaggcggggcccctgctggaactggggactgtgacgagggttttttaggaagggtttcaggaggggaggtctcggtaaccctgagtactttcttggggctgtgatgagcaggagaagagaggtgggaggtgctcaggacgatgaccttaagcccctggggagttgcagcgtcgctcaggacagcaggtgcacctgcagctgcccctcttccctccaggaggcacaggagttggaggtgattggtgtcacagccccccagagcctgcccttgaacccgagcctggggcagcacacagtgtggaggtcatgtggcaaacaccagtgggtgggtagagcttgccacagggatgggcccatctctctccctccttatcccagatcaccgcagacctgctgtccaacggcatcgacgtgtacccccagaaggaatttgatgaggactcggaggaccggctggtgaacgagaagttccgggtgagtggatccactaggatgttgttcccaggggacccccagttcctgctgaagggtgggttgggggtttggaggaccttaagccatgaaattatattcttggggccagagggcactgagcccaggtgtctgtacccagtgctgtcaggctgaggctctcgtttttgggggaccccaggctcagggcagctcctcccgggggcccaggggagggaattgccttcccgcacatgtgtaaccaataccgtctgcccgttccccaggagatgatcccatttgctgtggtgggcagtgaccacgagtaccaggtcaacggcaagaggatccttgggaggaagaccaagtggggtaccatcgaaggtactcgccgcaggcgccggggctccagacagatgggaagacagtctcttctgctgacccagagcctgtgggccacgcctgagccagggactcgtggaacctcatccactgccttgccccacccagagggaggggtctccttgtccccattcaacccttgggaaagtgagagggcaagtggcctgtgcagatgcctccaccccagacctccccccgggcagggaaagattcagggagacaggagctgggatgggggccgccaagttctggatcctggtgcaggctctttcataggcacctgtgtggccctggacaaatcgcccaacctctctgggcctagaaaaggggtgggctgtagctctgtgagccagatggaccctcggccccttaccctgctgaagttcctgggaccctcacaccttagtctcttgagtggctgttgtaaccaattagcacaaacgaggggacttaaaacaacacaaacgtattttcacagttccagaggccagaggtccgaaatcaggggctgtttccttctgaggccctgaggaccagcctcatccatgccttcctccttctggtggcgcctggcattcctagttgtattgtaaaggcatcacatgctctaatctctgccccattgtcacagggccttcttccctgtgtctctgtcccgtccctcctcttcctttttttttttttttttttttgtttgagacggagtctcgttctgtcacccaggctggagtgcagtgttgcaatctcagctcactgcaacctctgcctcctgggttcaagtaattctcctgcctcagcctcccgagtatctgggattacagtcacgtaccacccacctgacttaatttttgtatttttagtagagacaggatttcgccatgttggccaggctggtcttaaactcctgacctcaggtgatctgcccaccttgcttggcctcccaaagtgctgggattacaggaatgagccaccgagcctgccctctttccttcttgtctttggacaaggatgcctgtctttggacttagggcctaccctaagtggatgatcccatttggagatccttaatgaatctataaagaaagacgttttccaagtaaggtcacaatcatgggttccaaggcctggaccttgaccatgtctttgaatggatgggagcccctggggggccacagttcaacccactcctggcggtgacaccccgggagggatgggcccgaacgtttccttccccttcctctctctgtcccttcatttctcattagaatggaagaggggaaggtgcagagggaaatgcagcaggaaaagccactttgttctgggagagcacttggctgaaaggcccagtagagcaggaagcacaagtctcttaatcttccagggcctcagttttcatcatccacaaagtgggtgcagtgtgccaagattttagtgagttgagagactgtcccaaagaccacagagctttttgggaagctgttgctctaaaaaaatggtcataatgacaattaccaggaggcatcagacactcctgtgccactggctagacatgggttatctcgtttcatgtccgaagctccccgcacccaccctccttgcagagttgaagaggtgctgtgagcagaaaacctgccaagggacccagaacgggaggcggctctagaatctacagctccagccctgcaccagactccctcgagatgggagttcatgcctggaggagggtgtggagaggcacacgggcctttcccctgtctgcactcctcccctaccaccacccctgccgggcccaccctgcgggagctgcccagctgggtgcagcctgggtgttttccagtatccgcctgtggtgtcaggctggcttgcctccccttggcccctctgcctgcagttcctctcttcctctctgcccaaagagttcttgctgtttaggaaactttttatgaaaggcaggtttgggagagttagggatggatgggcctgggacgggccggcggctttgctatgggcgtgcctctgctgcaccctggtggccaaccttgagtaccgcaggtggccggtgacagaaactgtcaggaaatgcacaagagagaggtccccgcacctctctgacctgtgcgttgttgagcaccactggctccagctgaggaagagtctggaacctgtcaggacagttgtgaggtggtggggcccactttccagcagtcttatatgaggaccctggaaatgtgccttcagcactgctgggtttttatatcaggggccccatgagttcatagctgacctgacacccggactagtaagggctgtgccttgttcttgcctcccacttggtgaacagcatcttgaggtatctttcccatccttagaaaccaccccaagtattgtcaatagaaatgtggggtgtaattgatcacgccatgaactcatttaatcctcatgtccctgagaggcgggtgacgttattatccacattttatggatgaggaaactgagggaatgagagtaacttgcccgagccagggagtggcgatcacacactccaactccagcctgagagccccattcttcctgccggctctcgctgcccgtcagtgttagatgagagtgctgctggtcagtctgcaggaggttctagtgtggacaccgccctacacagggccgtggcaggagggcctaggcaaaggcaaccggcatagcactgagagcacttgagggctgggcaaggtggaggccccggccctgcctgctggcctaccaagtaaaaactagacatttttaacttggggaaaagccatgtggctctgcgatggggcagcctggagccaggtgtatgggttctgcatcccgctccagccttatgcactgtggagctgagacagacacagttcttgcgttctctatgcctcattttcttttcttttctttttctttttctttttttttttttttgagacgaagtttcactcttttgcccaggctggagtgccgtggcgtgatcttggctcaccacaacctccacctcctgggttccagtgattctcctgcctcagcctcctgagtagctgggattacaggcgcctggtaccaggcctggctaatttttgtatttttaacagagacgagatttcatcatgttggccaggctggtctcgaactcctgacctcgtgatccacccacctcagcctcccaaagtgctgggattgcagacgtgagccgtggtgcccagcgtctacgccccattttcgtaagataatggggataacaaaggaatcacaagagacacttgcaggtgtgtgaagacgaagttcatcacatgggagggcaccgggtgtctttatttgccttccctgcccggctccccacctccagtgatgccgttcactgccctccttgttaaaaggccttctgttatataacagttacacatgccaggcaccgcgtgttcatataggagttacgaagcacagcaataaaatgaccactctgagatggccaccagctcgagcccgagggcacttgtgggtgcccgtggtctcctgcccagtctccctgagaagtggccactgtcccgagcttgggcttgtatgtattgtgtgaagtgcacatgtccctgagcaatgtttagcattgctgattcttgagcttgtgaatggtcgtccacagtacgtagcccctgtgtgtgtccctgtgtgtgtgtgctctgagcgcacacaaggtggatggggccgtgggggtaacaccctgtgggccacaggttttctttaaaatcccagctccgattcctgcttcatcccattcccagcagcccagccccctgcctgtcttcaggcccctgctgggacgtcctgctctccctggtcaccccagtggtgcgggggcccactgccctggcttctccactgtggcttccttccatgctcctatttggcctggtcactgtgccatctcccattagccaggaactttctggagagcaggagctgagctgtccaggagcaggagctggtgctggtcactccagtatcccccagactgagggcagtgccaggtgtcctatactcagctgcagagcaggtggttcccctgccctcctgcccatggggctgccctcagactctgcttttggcaccagcatttctgggcagggggagagaggtggggtccgggcagagtttctccactgggacattaaagcccctcctgtctcctctcctagttgaaaacaccacacactgtgagtttgcctacctgcgggaccttctcatcaggtgagagacagggtgcttgggtggggctgacggcttcacccctaagagggccctacagcgggtgggggcagtgggtgtggggccgaagccctgggcagagtgggtgccccctgccacctgcctgccctgccctcgggaagatcttggaagcccatcttctgaaaaagaaaacccactgggaaatgaagcaggcagtgaagatccttttcaacccctgcgaagttggctggatgggaaggctgagctttgatccactgtggtctggcccgttagagctgcccggtggccactaagggcccagtgaggcctcatgtgcaggccctgccggcagcgtggggcgtctccagctccgatcccactggcctctgacccctacccctttcacctggctgaggcttctccttgtttcccttgagtccaggcaaggaggggaagccctgatggagagggtgctgggtgggtggtccctggagtgtgggccctggcctgggcaggttcttcctcagcaagcagctggcatggatgatgggaatgttatcaagaggaggggcctccaggttggcgggggcaggggtggggggattccgggagccgttctgccattgtggggatactgggctttccaacctccctccagattattcctcctgagctgcagaggaatgaaaatccgagcccaggacttttttttcctggggacaagggcaacccagccctttgccccaggccacctgcctgccacaggccatagtcctggaggccggtggtcacccactgcttccaccctgccagcaccctggacaccggcctggagcaacaatgctccagccctgtccctctgagtctatgcactgtccctgggccctggacccagggccatagggtggacccagagggagacacatgcactggaatatgtgtgttctgaccgagtctgggcttaccagggggactgacccttcccccaaaacgtgtaccagatctggtccaacatggtgggcctgggggaccccatggggagccaagcagtcgggatggggagtgggggtgggggcaggcgggcctgagtccgaggcaggccgagcagggcccctgccccgctgcccccaccccgctgcgcccacctcactgacccgcccgccccccacccccacaggacgcacatgcagaacatcaaggacatcaccagcagcatccacttcgaggcgtaccgtgtgaagcgcctcaacgagggcagcagcgccatggccaacggcatggaggagaaggagccagaagccccggagatgtagacgccaccctgcccacccccgggatcctgcccccaagtcatttccgtccccccccaggccctcccaccaccccattttattttatatgattttctccatttgtcatcgttccccaccccttcgacatgctgccaggaaacaagggaaggggcctccctccgagtgagtcagtgatgaggccgcggcctccccgaggttgtggggaggctgcactggagccacaggcaggggtgagagcacccactgaattgacatgaccctctgtccccaggcctggctccccgagggctcagaagagcagcttcggtgtgcagatcatccgtctgtgtggggttctcagtgccggaggccttggggtgggggccaggcctcgcacttgcagaggagcccagtgggctgcacgctcccctccatccccatcggccctgtcccctggagtgtgtcagagcccaggggagaatgcagcccaccaggagcacctggaccccctgcccgccacatggtgtggccatcactcagcccctacccctgccctgctcctaagggtagaaaactccagggtcccctgccaccgactgcccagccactccaagccccctggcagctgcccctcctggagcagaaagtgcctttatctcagccatccgcagactgcttggccagatgcggggacaggctggaatgagggaggcgtcttcatctccctgccatccccctctcacgccacccccgcccccaccgggctgcaggtgctgctgatgcgctgggatctgattgaggataaaaaggaaggagagatgacccctaccccctcatcccccagttttgaaaaggtctaagcaagtgagtctggtggaggagctgagggagggagccatggaaggtgccagaaggaaggttggcgggggcacgtgtgggccgtggcttgggctggtcagagtggcgtgagctgcccggcgcctgccctgcccaagtgaccagggaagtgtgtgtgtgtccatgtgtatgcgtgtccgtctgtctgtctagtgtctgggtttggcccaagactgggctgtagttacattaatgcccagccagccacccctgccactcacccttcctggcccaggccttgctgactctctgagctggggaggtgggaggccaggcgagcctgactctgttgatctacccgtgcctgggcccctcccctcagagcccatggtaacgaacccctagaaaggagagaacgggcgtcaggggtgcacagtccacagctgaagagcaaggtttcgtggcagcacggcccggcccctcaccctctgtccccacgaggggacccatgggggctgtctttgcagggcacagatgaccaaagtcccttcctgcttcctgttacctgtcttgctcctggggagaaagaggggcctgatgagactccactcaggtgcacacatcaccaggtgcatctgcaggcaccgggctggctgcttgcagccaggagaaggtcagcgagaaggagtgtatgagtgtgagtgtgtgtgcatggaagttggggcactgggcgtctgactccctccccacccaagagaggaaggacccctcaccacccccactggtgagacagtttactttgccaacttgccatgtttttgccaaaaccaagattttgaaggaaatgagtggccagcgccagggcccaggccatgtggcctgcccagcctcaatgtcacttggtggcggggtggggtgggggtgggcagcagcatcccagccttgagatgcttcactttccttctctgtaaccagactttgaaaaattgttcgtttcatcaggctctgttcctcaatggccttttgctacgtgcctcccgagaaatttgtctttttgtataaatgacaaagtgttgaaaatgtatttcctgaaataaatgtttcaaatgcagaaacccagaa

SEQ ID NO: 2 - DNA, 213797 bp, Macaca fascicularis
  misc_feature (9785)..(9884): n is a, c, g, or t
  misc_feature (24121)..(25028): n is a, c, g, or t
  misc_feature (101316)..(101714): n is a, c, g, or t
  misc_feature (156077)..(156777): n is a, c, g, or t
  misc_feature (158705)..(158804): n is a, c, g, or t
acaccagacggcgggccgccccctcctccctccttcctactcccggcccgggattagcgccctgggagcccgcgccccgcggcctcgccgccacactttcctgggagcggcggccacggcggcaccatgaagaagtcttactcaggtgggcttcgcgcccggggtgggaaggggtcggtgtcccgggaccagccctgctcacctgagcgcctgcggccgggagtggcgaggcgcccgcggagctgagcgagtccccgcggcgggcacaccgcaggtcgaatttctcccaggacagggccgctgtcgggccactttcgacctgagccgaacgtcccctgcgctgtctccagccctcgctcgagtgtctgaggggctgccctgtgggacgctccctcctcctcgccccttgtaccctcgcaggaatccctgactttccaggtcggccgggtgctttgggtccctggtgcgtctgtgtgggtggatggggtgggggctgggtggaggggtgttcttgggttcagcctccagggctggtgatccaggccgcagcatccttggggcacgggacggcctccagatgggactgtccagcagcgcccaaacttggcgactcgggttcgtgttttgcgctcaggacgcccgcggctgacatccgcactccaccctagcagggccctccttaagcaggcggaaggggcctgacttgggcctcaccatgagccggttcaggagtcttcataagaggcttccgctctggcactctgaagttccatttcacagatgggcacaccgaggccgcatgggcaggttaagggaaattcagatcttcattctttgtcttttcctttccttttttttttcctttgtggttttctccaaaggaccgaggcaggcaggatcctttgtcctcctcagtcctcaaattataaacagcgtctcctcttctaactctagaaaccctctgtttaatgttcctcctttaattcattcgaatagaaagttgtctgccaaggacccatgaaggacagaatcaggggccttagttggaggtgaaggagtcatcgcggccatccccctgcctttgggccattgtcggtttcctctggctttccatatttaggaaccaaatgagtgataaagaataccttgtctcaaagaggattacgaagaacttccccgaaaattcccttctgggtcagtagcttagaatttcaactttcacccggttgttgcaaacaacatggccctctccacaccccaggcacagctctgtcaggagcgtgggtgggttggtgtgctggtgggcgggagcgggcttccaggtggcacatgcttggttttggcactggggcttcctccctaacatgctccaaatacttgagatggttgtggggatcgcgcggtgcacggccctttcctggggatctctagcccgcctagggagggtccgttgcccttggtttcttacacttcatctcccactggtgggtccagacagtgggggtgaccagggtcctcccaggtcgtgggtcctgggctttttctgcggagaccctcctgcacagatgccggaaggaccctgaagcaggcttggagtctctgcacctgcggcttatttggagacggggagaccatcacttgtccctttctcctctcttccacacctacgccacctctcactgggtttctttttttaaaaaaggacagaaccttttgcagtaggtggaagtagagtttgtggggggagcaggaaccagctcttgtaaagcagcctcggtggctccttgtgtttacctaaaggggcgggcccctctgaggatgggggaagggaggactcagaccatttctggtttgctccctgcttggcagtggcccaaggtgtgctgggtcactgtgttgcagtcgtatggggtcagactggtgggggctgatggtgaaggtggcctcttgccctcattctgagtgtcctggagctctcttggtagcagctctgttccaggtaggggcgcttgcaggagtcaggctgacccctcaacagccgtcaacaccatgaaattaaggaaagcagcaaaagatgttgaaaatcttcctagtctctgacaatccaaggacaacaggaaggtttttattttttcatctagattgagcgggattattgcttctggacctgtatatgggcttcagaataaactgaatgaccataatgttcctggtagagctggtttgaacactcacgagcctctgaaaaggaaaaatattttagaaggatgtgttggggcaatctcaagtaccgtgggtctgtacacagtcatcgaacacactttatgtgttgggcacacacggccaggtctgagtgggtacagaatgataatgagatgtagtccttgcttgcagagaacttacattctcaccgggagtcaggatgagggtgagacaccagctcattaacacccttccctcctgagcagttcatcctccaaatactacaggaatgccccggaggttttagggagagctgggccttgaggaagaagtcttgagtagtggagaataaaaagggacttggccaggtgcacctgtagtcccagctactcaggagactgagacaggaggattgcttgagcccaggagttcgaggctgcagcactatgacagcacccggaaacagacactgcactccagcctgggcgacgtcatgagaccccatctgtaagaaggtcttgtccaatggggaaggcagcaagggcccacacggggcagctgcaggatatagggggacactggggacaggctctctctagcagctccactgctgctccaggctttcctgatgtgcctcacctggccttctagtgagttggagatagtggtagtctacaggcagtgtggtccagtggttacacttggggactcagagccgccaacgccttgggattaaatctcaccgggctgcgcctctccctgtggcacaaggttctcacctcatgcatctcatttgcctcatttgtttgtgtgtgtgtgtgtggtgtgtatgtgtttttcttttcttttcttttttttttttttgagacagagtctcactctgttgcccaggctgaatgatctcagcttactgcaacctctgccttccaggtttaagtgattctcctgcctcagcctcctgagtggctgggattataggagtgcgccaccacgcccacctaatttttgtatttttactagagatggggtttcaccatgttggtcaggctgatcttgaactcctgacctcgtgatctgcctgccttggcctcccaaagtgttgggattacaggcgtgagccactgcccagcctgcctcatttgttaaatgggacagtgctatgttgttgtaaaggttaaacgagttcatatttgaaaaagctgagaaatgcctgctctgtgacctgttagctgctgtcgtgatcgtgattgtgattgtcattgacagcaggaggatggagaaggctggggttacgccattgctaggatgttccaggagcctccatgatcttcccttactgcagtcagagtacggtgcagggtctctcccccagcccgtcagcactggagccagctgcactgtaccccccggttctctgggttctgagttttgggactccctttgcatactaggtcacatggaacttgctgttattcccaggctcccctggaaactctctgtgtgtggcagtggcaggaggacttacccaaggcccatgagccacagaagcgggactgaggttgcatggcacccccactggcacctgggaatgactctggggattctttttttattttttattttttgagatggagtctcactctgttgcccaggctggagtgcagtggtgcaatctcggctcactgcaacctttgcctcccgggttcaagcaattctcatgcctcagcatcctgagtagctgggattacagatgcgtgccaccgtgcccagctaatttttgtattttttagtagagacggggtttcaccatactggccaggctggtctagaactcctgacctcaggtgatccacctgcctcagcctcccaaagtgctgggattacaggcaggaaccactgtgcccggccactctggagtttctctgtggctttcaggagattcctgaaggggcaccagccatgattcaaaagctctatgctgtcatgacttctgagtcctgagcagggagggaggctgcacccacagaggaagcagcttctgttgtgattcagtacgctggctcgccatggtggacagggctgcacccccacccagcgccccaggagctgacttatgggaagggcaaggaattgcaccctcagagaacacttccccactttgccaggcactaacctggtgccaggcaaccatgggaagggcacaagcccagggtttcttcctcttctcccccaaccccgtctccgtgcctgttctcgctgcctcttgcctcctcacgtccacgcttgtctgccctggcacattcaggggacctgggctggagagaaaaagccacctcttatagttagtctgtggctctgtctgacttgtgtcctccaccgaggccccccagtggtgagacagctggctgagcctaagtcctggggccagccctctccctagtctgttgcaaagataggaaggcatgcccaggcaggggccacctgccctgccccctcacgccaaccgcaggcacttgcccgtcagatctcctcggcctgcccagaggggttctgatagctgagggcgaggcacctggcagcggggcattgagtttgcgacagtccaccttcttcctggaaccgtcccccacaagtgggaccaactgaagccaggacaggcgcagggggacccaggattgccacttcggggcagtggtctggagtccaggtccaggtgacatgggagccaaccctctgctcggaggtcccaggtgtgtgtttgcagaggacatctcacttgaggacccatggaaggggacactgcccaccccctacccggtccttgggctgccctcctctgacactctcctgcccacccatcccaggcagccctgacagtcccacgggactgggacctagaggtggcccctgtttccgccccagtgtttgtccacaggcagccttgcgtgggctctgaagtttgcctaagatggacctgataaggaaagttcagtacacatcagtgcaggcccggcctgggggtgatgatggcagttcctgggcagatcccgctggctttagggtaggaggggctccagagagaggctccaggcccctaggggtgtgaacctttggggtgaggagggaggtgacgcgctgggttcctgcgcctctgtttgttggagccattaccttggaaacatcccagctctaggcggttgccagggatttatggggatcagtgggtgccaatgcctgggtgaagccctcagggcttgtacacagcacacagctctggggcccagtggctcacttcactgtgtgaagtggctcagtctccgggagagcccttagccaggcaggcctgacggcaactgccaggtcatggtgatctggaatcgctgaccgaagggagtcagtcacggtgggtgcagggccccggtggggagccatcgtgatgccaggcatggggatcgtgtggcacccaggcctgtgggtgacgagcttctgtggggacagtgaagtgcccccatggctgatgggctggtcacctctgcccctttcctgatgcaacagttgtgcccgtgtcctgggaattttgccaggaggcctggcattggcctgctctactggagcagcgctgctgagctgtgagctgcttgtctccctgaggttcctaggccatttcaactctccatgtggatttggtcattcattccagaatcgtctgccgggtgccgctgagtgtcaggctctgtttgcctcctctgctgcaccctggaggctctgggcaccagctctgcagggtggcctggccatgggtctccagggtagagcatggcactctctactcccagcccagtttctctctgcctatctccctgaccccaccccgggtgcaggtccattcgcagcccctgggaagggagtcattgagctgttgctggcaggggagggaggctcccaggcactgcttaccaatggcctctccgcagctctgtgacagctgagctttgttctcagcctaatctgacctggttctccaaagctgactgttggcagcctgaaaacctccagaacaggaaacaggagtggcgcagggaatgtaagatgatcccagcttcaagtcactgggccgcccttagacccaggctgcctgctgtctctggcaggtacccaagtcgcttgtcatcctcagagcagtgttggccccgggccttcagtggcctttgtgtcagggtgagaggagccctggatggccactctgccctgggtgtgtgggtccccagaagtgctgggttagggggcacagagggccagaaacgctctggagcactggactctctcgctgactcctaccctaccctggcctggggtttcaaagaaggggtccaggcaggagtgccatcttttctcaatggggatgtggcttcagtctctgcccaggtgggtgcgttgctctctgtctggctcctaaagaggtctggctcctcccaggctgcggaaaggacctgtgatgaggcctatgccctggccggggccctctgcttttcccagtgctgcacctgggaaccaggggttgggccccggaagccgaggacgtccctgaatgccatgcctgggcacctgtcctggccaggccaggcgtgttggggcagcggctgagatgggagcagcagcgttgcctgccaggtttgagatgggccccgggtgcgtgtggttaccaggaagggctgggcagagcaggcgggtgggccacccccgggccttatgcagcaaatcaacctgatcctcatcctggggccggggcttcctttcacagccttcccgtaaactatggctcctgtttccatcccaaatcagatcccagcaggggaataatgtccgtgtaacccaagccacttggaagtgggttacatccaacccctgtcatcttccagcttgttgaggacttgactaactcaacccagagggatttggagggttgtctgcaaaacccactaataacaggggacttcagctctgtagccacagggtctacagaggtgtcgggctgtcgggttattgctgggaggtgagccggtggtgtagacaccgtggaggcaccggtcgtggaacagctgcaagtgcacacagaggccggcatcgaggggtggggaggaggaggtggatttctcgccaatgttggcatcatgttgcctccagcatcagagacccaaggtgtggctgacctcggctggggtgatgagtcattggataacagagccttcctggtagctgggggttaacgctttaactgctaggcctttgtattatgctgcttcttttgtttgttttgttttgttttattttgtttttgagatgcagtctcactctgttgcccaggctggagtgcagtggctcaatcttggctcactgcaacctctgcctcctgggttcaagcaattctcctgcctcagcctcctgaatagctgggattacaggcacgcgcccccatgcccggctaatttttgtatttttagtagagatgggtttcaccatgttggccaggctggtttcaaactcctgacctcaggtgatcctcccgtcccagcctcccaaagtgctgggattacaggcgtgagccaccacgcccagcttgcattatgcttttttttttttgagatggagtttcgctcttgttgcccaggctggagtgtaatggcgcgatctcagctcactgcaacctccgcctcctgggttcaagcgattctcttacctcagcctcccaagtagctgggattacaggcctgcgtcaccatgcccagctaattttgtatttttagtgtagatggggtgtccccatgttggtcaggctggtctcgaactcccaacctcagatgatctgcccgccttggcctcccaaagtgctgggattacaggtgtgagcaccacacccggcctatgcttattattattactatttaattttttaaggaaagcaatctaagctatacgctgtatcccttctttctcttttgctttttgttgtcagttttctgtgttacttattgccaaacaacatgaacaggaaattgaaaggaaaacttcaacaatcattgactgtaacatttcttttgtgttccattcagtgcttgtttgcacaggaacatgagataggatttgatttaattatgaaaaaggcatatattttcagagttgcatactccccatagaatgaatgttgttgaattctgttcttttcactcgaaattagatctcaggcatggatttcatgattatcagtataatcgttcttcagagtggacattccatcatgtaggggaccatcctctccccagctgctggtgtggacgctcctccttggtggtgtggacgctcctccttggtggtgtgggtctgggcccttgaagggtgatgtcctgagtaaagatgttacagtagccgtgcttatacatgcttatagctttgggcccagggctaggtggagactggcttcaactctagagcttgctgtcttaaattattattattattttttttgagacggagtctcgctgtgtcgcccaggctggagtgcagtggcgtgatctccactcactgcaagctctgcctcctgggtttacaccgttctcctgcctcagcctcccgcatagctggggctacaggtgcccgccaccacgccgggctaattttttgtatttttttagtagagatgggatttcaccgtgttagccaggatggtctcgatcttctgacctcgtgatctgcccgccttggcctcccaaagtgctgggataaaataaattcttagggccgggagcagtggctcccgcctgtaatcccagcactttgggaggctgaggcaggcggatcatgaggtcaggagattgagaccacggtgaaaccccgtctctactaaaaatacaaaaaattagctaggcttaattagtcccagctactacaggaggcaggagaggctgaggcaggagaatggcgtgaacctggaaggcggagctttcagtgagctgagattgcaccactgcactccagcctgggtgacagagcgagactccgtctcaaaataaataaatacattcttatacccacttgcattatttattattattattattaaacagggtcttgctgtgttgtccaggttggagtgcagtggcgtgatcatgacctcccagtctcgacctcccagtttcaattggtcctcccttctcagcccgccaagtagctgggactacaggtgtgcactgcatgcctggctaattttgaaaaaatttttgtagtggccaggcgcagtggctcatgcctgtaatcctagcactttgggaggctgaggcaggcagatcacctgaggtcaggagttcaagaccagcctgaccaacacggagaagccctgtctctactaaaactacaaaattagccaggcgtggtggcgcatgcctgtaatcccagctcctcaggaggctgaggcaagagaatcgcttgaactggggaggcggaggttgtggtgagccgagatggtgccattgtactccagcctgggcaacgagagtgaaactccatctcaaaaaaaaattttttttttnnnnnnnnnnnnnnnnnnnnnnnnnnnnnnnnnnnnnnnnnnnnnnnnnnnnnnnnnnnnnnnnnnnnnnnnnnnnnnnnnnnnnnnnnnnnnnnnnnnntgagacggagtctcgctctgtcgcccgggctggagtgcagtggccggatctcagctcactgcaagctccgcctcccgggttcacgccattctcctgcctcagcctcccgagtagctgggactacaggcgcccgccaccacgcccggctagttttttgtatttttagtagagacggggtttcaccatgttagccaggatagtctcgatctcctgacctcgtgatccacccgcctcggcctcccaaagtgctgggattacaggcttgagccacaatttttgtatttttagtagagacggagtttccctatgttggccaggctggcctccaactcttggcctcaggtgataggttcgcgtcggcctcccgaagtgctgagattaagggcatgagccaccaggcccggccatggtcggcagtttttgaccactggtcgttctccgtgtgatcagtgatcttcctcttggcccactgaccctgccctgttcatctgctcacctttctcatgcatactgtttgttcgtgggggatgtaatggggtctaaccaggaaatggaaaccacttgagtattaattaattaatttatttatttatttttcccaagacaaagtcttactctgtcgcccaagctgaaatgcggtggtgtgatcacggctcactgcagccttgaactcctgggctcaagcaatcctcccttctgagcctcccaaggggcttggactataggtgcacacgatatgccggcctaatttttttttattttttgtagagacagggtcttgctttgttgcccaggctggtcccgaactcccaacctcaagcagtcctgcctcagcctcccaaagtactggagctacaggcatgtgccatcacaccctgctaatttttgtatttttttttttttttgtaaagacagggtcttactatgttgcccaggctggtcttacattcctgggtttatgtgatcctgctgcctgggtctcccaaagtgctgggattataggcgggagccacagtgcctggtccacctgagcatttagaacagaaggactgaaaggcagggagcttgttacacagaggatcggagaggtgaaggccggacagggaacagaaaggcaatcggcaggagatcagagtcgtgtagacttatgcagccttctaagggtatggatgcaatgattcactcagaatttcgagaaagcaaataacaacaaatgataaattataagcagctgttaaatatcacaaacatcactacatgcaaaagagtatcagtcaagttacctgtcatagctccaaagttatatttctcccacatttttggcattacttcttcaatatgatgactttgtaatatcgttttctattttgagaatagaaaactaatcaggctggacacagtggctcatgcctgtaatcccagtactttgggaggccaaggcaggaggatcacttgagaccaggagttcaagaccagtttgggcatcatggtgaaaccccatctctactaaaaatacaaaacttagcagggcatggtggcatacacctgcagtcccagttacttaggaggctgaggtgggaggattgcttgagcccaggaggttgaggctgcagtgagccatgatcatgacaatgcactccagtctgggcgagagactgagaccctgtctcaaaaaaaaaaaaaaaaaaaaaaaggccgggcgtggtggctcatgcctgtaattccagcactgtgggaggctgagatgggcagatcacttgaggtcaggagtttgagaccagcctggtcaacatggtgaaaccccatctctaccaaaaatataaaaaattagccaggtgtgatggcacatgcctgtaatcccagctacttgggaggctgaggcaggagaatggcttgaacccaggaggcagaggtttcagtgagccaagatcatgccactgcactccagcctgggcaacagagtaagactccatctcataaataaataaataaataaataaagcaaattaatctccctagttgatcaaatttcatttttattttggtagttgggatgtatacaaaagtggcggtcaacacagagttggtggtgctgctacaatttttttgttcaagaaacacaggagttctggtaaatcctatttttttttttttaatgtgattcccatcaagaaagagagaggaaagtgggggatattgctaattatttctgtccagagagacttttctgttttgactccacattgaaggaattgaatcatttgcttactactttgcctctggtgatgggagtaattttccacagatttgcttctggacctgtgcatttcaaatcttgcttctctccactgcgcacatttttccggcgccaggcaccgcaggatatgttcgtgtcttgtgatttttgattctgcgcggtaggtggaattggaacggtgagcggagcgagtattcctggaatccatttccgcaccggaacagcgagcattaactgaactatacatggaaataaatgggaactacataaatataacccgactaaagccaaactaaatatctttccagttcaacttctccttagcaggagcccccacatggcagcaagcctccgtttccacctcacacgagagaaaatgtgacgggcaggaactcaagactggaaatgaacggggatgttaattgatcgtagggaaaatattttccattttgtaaattttacaaaaaatgtttgaccccgtggacatgtggttagggcccttctcggtgccttgagagggacccatgcaggcagaggaagcgttctttgcattgcgggggtgacctggagattggcagcagggtgccaccaccagccctaggtcaggggatgaaagggaggaaggcctgtgaccagagtccaggggccagagtcacctgctgggagcccaaacaaaggtgggactctggcaggagctggaactacacaaaggaccaaccctcctgctggagacgccgtcttaggcagaggaggtggagagctcccgcccctccctggctcccacctcccaggctcctccccagcctatcattggttgaacccagcccaaagccagcaggcctggggtcctggacacctgagccagcagaggtcggcatttctcccatacaaaggagggcacgagaagtgggaggcacggagggggatcaggccaggacctgcacaggatgtgcaaagagaagctcccctctcttcccactcgaaatggcatctgcagccggcctcacttccccactgttagataggaagaggaaccttgttcctgtcatcagccgccacccccacggaggcccctttcctctttggtctttgcttgcaatcactggcgatgctgatggaccgtatcttctggggagtttggtcattaacatggtttcccatttgttatggactgaactgtgccctcccccttgaattcctgcattgaagccctaactcccaatgcagctgtaattgaagatagggcttttagggaggtaattaaggttaaatgaagtcatagggtgggaccctaatctaataggattggtgtccttgtaagaagagggagagacaccagagatctctcttcccccctcgcttgtaagcagagaaaacatgaccggagaacacagcagggaggtggctacaagccaagaagagaggcctcgctgggaaccaaccttgacggcaccttgatctgggactttgggcctttcaaactgagaaatacatgtctggtgtttaagtcactccctccatggtaatctggatggcagcctgagctgaccaaagcaccatctgtatcagccagggctctccagagagacagccaaaaggagatagatggatggatggatggctagatagacagacaaacagacagatacagacagatagacacagacaggcagaaagataaacaggcagacaaatggctagatagacaagcagacagagagatagagacagacagacacatacaggcaaacagacagacaggcagacaaatggatagatagatgatagatagacaggcagacagatagatagccaggcagacaaacagacagacacacagatgataggctgggtgcagtgactctcacctgtaataccagcacattggtaggctgaggccagtggatcacttgaggccagaagttcgagaccagcctggataacatggtgaaaccccatctctactataaatacaaaaattagctgggcgtggtggtgcgtgtctgtagtcccagctactcgggaggctgaggcacgagaattgcttgaacctgggagttggaggttgcagtgagccgagatcacaccactgcactccagcctaggcgacaaagtgagactccacctcaaaaagaataaaaagatagacagatgatagatggatgataggtagatagataattagatagatagatagatagaaatgacagatggacaggcagacagataaactgattagatagatgatagatggatagatagaagataggtgatggatgggtgggtagataggcagatagatggatagaaatataaatagatagataggaaggaatttgttaggggaattgacttatgccattgtagaggccaagatgtaccacagaaggctgtcctcaagctggagacccaggaaagccagtaccatggctcagtccaagtctgcgggtctcagatctgggaagctgttggtgtaactgttagttcaaggccaaaggcttgagagcctgggagactgctggagaactgggagttatttttattttattttgttgttgttgttgagacagtcttgcttgctctgtcagtcaggctggagtgcaatggcacaatcttggcttactgcaacctccgcctcccgggctcaagcaattctcctgcctcggcctcccgagtagctgggattacaggcgtgtaccaccacgcccagctagtttttgtatttttagtagagatggggtttcaccatattggccaggccggtcttgaactcctgacctcaggtaatctggccgccttggcctcccaaactgctgagattacagatgtgaagcactgcgcccggccgagaactgggagttctaagtccaagggcaggagaagaagacatccagctccaggagaaagagaggaattcaccttttctctgcctttttgttgtctggccatggaatggtgtcatccacagtgagggaggatctttaccactcagcccaccaacttacatgcccatctcctccagaaacaccctcacagacacacccagaagcaatgcattaccagccatcccttaatccagccaaactgacacctgccatcagccaccacaccggctcagcagaaccgtggttgcatggcgatggtctccatcccatctaaagaagttgaagatgaactgttggcacaagccagtcgttctttcaggctccttccagttgttctttcttttaaaaatgtatttattgagcacctgctgtatgccaggtgctgtgacaagcactagggcacagcagtgagcaaacaaggactcttctttcttggagtgtacatgcggtagaaggaaacagagaatcaatgaattcatcagttccagaaaactgtcaaaataggactaagaactatgccgagaattaagataaggtgattgtgggccgggcgtggtggctcaagcctataatcccagcactttgggaggccgagacgggcggatcacgaggtcaggagatcgagaccatcctggcgaacacggtgaaaccccgtctctactaaaaaaaaatacaaaaaactagccaggcgaggtggcgggcgcctgtagtcccagctactcgggaggctgaggcaggagaatggcgtaaacccgggaggcggagcttgcagtgagctgagatccggccactgcactccagcctgggagacagagcgagactccgcctcaaaaaaaaaaaaaaaaaaaaaaagataaggtgattgcatagaaagcgactgatggctgctttggaatgagtggtgaggggtcacagagatgatgacagctgagttgagactgggaagacaggaaggagccagcagtgaaaggactgagctgggagcaagcttggtgccttccaggaacagcaaggaggccagaggggctgcagtggagcaggggagggggaggagggagacgcaggtcaaagaagagcctggggccagatggaggacccttcctccaaagctcagtcatttcctccttaaaggagaatgtgttacctccaaaagtcacacttgccagcacagtgtctggctcatcatatgccttcagtcggcggtgagcatggctgctcttgttattactacattataattactaggaataatggggtcaccaggctttgcgtttacagcaacgtgagggtgtcagcaagcttccctggggaacccatctcccctcactaagttcataagagcctgacagccaggtcaatgtagtaagagctacagctgcccagtggactggactctttagccaggggccagggcactttcatctcagcagaaacctctaaggggactggggagtgtgctgtggatgtttctgggttactcaggcctccttgggagccttccccaccacagctgctgcagggagctcagttgcagtgatgagctgcggctcaaccttgttagtgcagagattgtcacttgggtgagtgaatggggctcaggatgccccaagggtatgtggagatgggggtcagctgtcttctctgatgccttgcaacctcctgcccctgcctttctgcatctcgttgcttcctggcctctctcactttgggtgctttggaacgacatgcaatccaatacacaggctgactttattattttattttgttttgttttattttattttggagacaaagtctctgtcactcaggctggagtgcagtggtgcaattgcagctcactgcagccttgaacttctgggctcaagtgatcctcttgcctcagcctcccaaagtgctagcattacaggcatgagctgctgtgcctggactaggctggctttaaaagctcctcactctctctgcatcctgatgatacctacctcctggaggaggctcccagccattggcttctgacactttgtagctattgttggccagttgtggcatgtgaagctgaggctcaagagaagggcaggcctgtccaaggccacacggctcagtgctaacactcagacttcagtgttcttttttattttttatttgtttattcatttttgagacggagtctcactctgtcgcccaggccagagtgcagtggcgcaatctcagttcactgcaagctccgcctcctgggttcacgccattcttcacctcagcctcctgagtagctgggactacaggcgcccgccacctcgcccggctaattttctttttgtattttagtagagatggggtttcaccgtgttagccaggatggtctcgatctcctgaccttgtgatctgcccgcctcagcctcccaaagtgctgggattataggcgtgagccaccgcgcccagccgacttcagtgtttttatctccctcctggtcacttccacccttagtgcatctctggaggcccgagggagctaaagaccaggctttggtcggctaagaatttacaaaagctatctctgtgctcctctgtcagttcatcactctgttatctcccccgacaatgaattcagtttgaatttcagataaagattaatttttagtataattgtatcccacagcacatttgggatatacttatgcctaaaaatgattcactgtttgctggccttagtagctcatgcctacaatcccagtgctttgggagtctatggttggaggattgcttgagtccaggagtgttcaaggttacagtgagccatgatcatgccattgagctccagcttgggtgacacagcaagatccttatctcttaaaaaaaattgttgactgtttatctgaaatccaggtttaactgagcatcctgtattttatatgagaaccctatatgggtgagacccagagtcctgatgcccactggtaagccttggcagggaggctctgtgggtccttggctggcactgatgccctgtgatgagcagggccatctggcgaggtggacgcctgctgcccgtgcaggcagagcaaggtcctgggcaggcatgagctgatctcaccttccccaacctgggagccagatactactggcagcttgccatcaagagaggggccgcctccgtgggccttctttggctttcggccctccccctaaccttcctcctaccccaaacagaggcccagggcaccgcgccagaaccagcgtgctgcctcctttggttggcattttgtagttgggtggactgtttccttgtcacaggaggtggcgggtgccccttccacttcacagggaggatggctgggactcctgaccttgaggcagagtgctgtcttttttttctttttttttttttctttttcttgaggcagagtcttgctcttgtcacccaggttggagtacagtggcatgatcttggttcactgcggcctccacctcctgggttctagcgattcttctgcctcagcttcctgagtagctaggattacaggcgcatgccaccactgagaacaatgccttctacagggtttattctcctgtaggagcaagttcccaaggcaaggggattgctcacctcatggatgaatacattgactttaatccacagccccaggtgtcagccttgagggtggggaaaggttgttctatgtctggggaggggtcagggcaaggccaggagggcctggtgcccagtgtacctcttcagggtacaactccaggtagcagaggccaaggacagaggggaggagaagagggaggtggccattatctccttatctcagcttcctctggagataagcttaactattttagctatccactaagtctggagataagtctggaatttaaacctttgactttgatccagcccttcacagctcctgtgaccaaactgagcttcagaaaaagggagtgaagcctgtgcatcctggacacccccaaccccggttcaaaccgcccccatccccagctcaaaccgcccccaccccaggctcaaagtgggaaggaaccacggggaaacaaacaggggaggcaggggtgacccggatgaaagtctccatgacccacctttccccagggtctatcttgggagctttttaaacttttattgttttttaatagagatggggtctcactgtgttggtcaggctggtctccaactcctagcctcaagccatcctcccacctcagcctcccaaagtgctgaggttacaggcatgagccactgcacctggcctctctcaggagtttcaagaaaaaagttgggaatagattcttttttttttttttttttttttttgagacagggtttcactctgtcgcccaggctggagtgcaatggcacgatctcagctcactgagacctccacctcccgggctcaattgcttctcctgcctcagcttcctgagtagctgggattacaagcatgcaggctaattttgtattttcattaaagactgggtttcaccatgttggtcaggctggtcttgatctcctgaactcaaatgatttgcctgcctcggcctctcaaaaagtgctggggttacaggtgtgagccaccgtgcccggccaggaatagattattttccgtagatgacttctgtcattattgcaaatggatgtttatgcacaagtgagttttcataatgtctcatcctgaaaagctcctttttgagggaatggtgacttttgatagaggagagactgtccaggcctcattcattgtcagcacaagggcagagcaggggtgtggcggtgtcaccctcctcggagacagccccatccctgctctgcccaggggttcagaagtctggtctattcgagcccccagaggggtttggagtggctgtcttacatcacaggtggggtctgtaaggatctgaaatggcctttgagaagggcggtgtggttggtgcattccaatcattaaagtaacaacaatgatacatcaaatagggtctgctcagattctgagtgcccgtttccaccttgtgacttaccagattccaccttgtgacttaccagattctagcataaaaacccaggtaaaagaaaaaatagctgggtgtggtggttcgtgcctgtaatctcagcgtgaggccaaggcaggattgcttgagaccaggagtttgagaccagcttgggccacctgagaccccacctctgaaaataaacaaacaaataaaagatcttcatgctgtatgtatttcttatatctaggttccccaaattatatgcattggggaaagtccattaagagaagcccctggccgggtgtggtggctcacgcctgtaatcccggcactttgggaggctaaggtgggagaatcacaaggtcaggagtttgagaccagcctggccaacgtggtgaaaccccatctctactaaaaatacaaaaattagccaggcttggtggtgcatgcctgtaatcccagctacttgggaggctgaggcaggagaatcacttgaacctgggaggcggaggttgcagtgagccaggttgatgccattgcactccagcctgggcgacaaaacgagactccatctctaaataaataaataaataaataaagcgggttcctagatatgtggaccagaccccacccctgcaaagctgctgtgcccaaagggggttgtacttggtggagttggggcaaaagagcagggagggcaccgggcagttgatctggtctccactgctggaaaggggctgtgctgttggtgccctgagctggttccatgaggaagacgctgcatgctgcatggggcgccctaagtttgcccgtcctgtctaggctcaccctttcctctccaggaccagggaacccgctcgtctcttgtcttcagcaccttctctctgacttgtgagcgctgcatttctttctgcttggaacgctggcctgtgttggatccccgggctcctgccttctactgtcttttgccatacctcgtcaaagtgtgttttatttatttatttaatttctttattattattatttttcgagacagagtctcgttctgtcacccaggctggagtgcaatggtgcgatctcggctcactgcaacctccgcctcccgggttcaaatgactctcctgtctcagcctcctgagtagctaggattacagacacacgccaccacgcccggctaatttttgtatttttagtagagatggggtttcaccatgttggccaggctggtctcaaacttctgacctcaggtgatcggcccacattggcctcccaaattgctgggattacaggcgagagtcaccatgcccggccaactattgtaatattgatataataatagtatcacagccaggtgcagtggttcacgcctgtaatcccaacactttgggaggctgaggcaggcggatcacctgaggtcagttcgagaccagcctggccaacatggtgaaaccctgtctctactgaaaatacaaaaattagctggggcgtggtggtgggtgcctgtaatctcagctatttgggaggccgaggcaggagaatcacttgaacctgggaggcggaggttgtggtgaactgagatcgtgccactgcagtccaacctgggtgacagagcaagactccatctcaaaagtactactactaataataatatcacttactgagttttaattttgtgccaggcactgtcctaagtacttgtactatgtgacctcatttactcggaataacctataagtaagcaccacctctgtccctaagggagctgagactcaggacatggaagtcatctcccagggcccacagcaagggcctggtgaggtctgcatttgaattctgatcatctgactcctggctttcctgcctcctttgcctccccaaactcaaaaactttcatttggaatgactccagacagctagatttcaactgtgttctctccttctgagtatgttttatttatttatttttttttttttttgagacggagtcttgctctgtcacccaggctggagtgcagtggccggatctcagctcactgcaagctccgcctcccgggttcacgccattctcctgcctcagcctcccaagtagctgggactacaggcgcccgccaccttgcccggcccaccttgcccggctagttttttgtactttttagtagagacggggtttcaccgggttagccgggatggtctcgatctcctgacctcgtgatccgcccgtctcggcctcccaaagtgctgggattacaggcgtgagccaccgcgcccggccgagtatgttttattttaaaatcacataaagataactcagttctcaactggagccacggaatcgttagatgtcttggagacttttccagctacctctttgctggactcagacacaggcctgaataattaggtccgaggagctgaaccggcgctgcttgtggccagaggactcttcctgggaacagtggtggtgacggcggctgcactgagcctggcaatttgttcaagagcagggggctctcaggctgcgctcgtccccttcttatgaacgaagtttgctttgcgtcttctctgtgccaagggctgccaggcacaagatgcctgttttgggaaatcagaaaaataaacagtgtaaataaaacaaaaactccacccaagaaatctgagacagatgctgttttccccaccgtttctccacccccatgctgggtttggagagagtgggccagcctgtttcctagggataagatgccctggggagtttcacctggatggaacctcttctattttacttttgcccggtgccagggggcagagggcaggggtggtgtccatctggcccagggaaaaggacagggcagcctttgtcgccggcatcccctgcagagatgtctcagccagaagtgacttgatccaggaacgtgtgtcccgctctctgctggttggccgctccttacccccccgttgtttccatggtgaggtgtgctggatttatgggaagagctctagttcactctcagccccggacagcagaacatcccagtagtgccctgatggtgtgtgggtggggatgtgtggaacaggatagtgaccccatgtgcattatatgcagtgcgccttccagtcaggtgtgctcatggccatcgtggaagtgagctcagctggggctggagggcccaggctcactgtgtgccactcagcagccttgggagcaggttcatcctcctcccctctctcctgtcctggtcccaggcagcccaccagagccgctctctgggccgtctctcctggtcttaagggggctgtcatttctgggaggcagatgctggcccctccatccccgcctcctggagatctgcgccaaggtctgcctttctgtctggagggactggccgggaactcctgggttttcctggtggggtttttgttgcttagcagtgagcagagtgagctggcaccaagaggaggatgctgggtgaggtcacggacatggctggggcaggctgggggtgctggaggtgaattcctcagctgtgcgaccttgggcagtttgcccagtcctgagcctcgcttcctcctctgtgaaatggggcaggagcacctgcctgctggggttgtgggttcagtgaattggagctaaggtgcagctcacagcctgctgtcagaccctcggaagcagaagtgggtgtccctgctcggcgtcctctggctgttccttcaaggctcagcttggtcctcctcacctccgtgaaacctccctggttactccaggcatcaggacccactccctctttggagctttgtgccacacgcgtttctcatggtgttgctttccctggaggatgggttcagctaaaattggggcccatctcggggttccccccagcaccagagaggctcagacttagtagagacgggtacccagttgatactagttccatgaaggacacactgtgcccattctgctgccagctgctgagtctggtgtcctgtagttatggaacatggatacaagcctgggcagctggacacgaaggccaggtgcgcaggtcactctgcctcagctctgaacctttagaaacaagctggctgcacccatttcnnnnnnnnnnnnnnnnnnnnnnnnnnnnnnnnnnnnnnnnnnnnnnnnnnnnnnnnnnnnnnnnnnnnnnnnnnnnnnnnnnnnnnnnnnnnnnnnnnnnnnnnnnnnnnnnnnnnnnnnnnnnnnnnnnnnnnnnnnnnnnnnnnnnnnnnnnnnnnnnnnnnnnnnnnnnnnnnnnnnnnnnnnnnnnnnnnnnnnnnnnnnnnnnnnnnnnnnnnnnnnnnnnnnnnnnnnnnnnnnnnnnnnnnnnnnnnnnnnnnnnnnnnnnnnnnnnnnnnnnnnnnnnnnnnnnnnnnnnnnnnnnnnnnnnnnnnnnnnnnnnnnnnnnnnnnnnnnnnnnnnnnnnnnnnnnnnnnnnnnnnnnnnnnnnnnnnnnnnnnnnnnnnnnnnnnnnnnnnnnnnnnnnnnnnnnnnnnnnnnnnnnnnnnnnnnnnnnnnnnnnnnnnnnnnnnnnnnnnnnnnnnnnnnnnnnnnnnnnnnnnnnnnnnnnnnnnnnnnnnnnnnnnnnnnnnnnnnnnnnnnnnnnnnnnnnnnnnnnnnnnnnnnnnnnnnnnnnnnnnnnnnnnnnnnnnnnnnnnnnnnnnnnnnnnnnnnnnnnnnnnnnnnnnnnnnnnnnnnnnnnnnnnnnnnnnnnnnnnnnnnnnnnnnnnnnnnnnnnnnnnnnnnnnnnnnnnnnnnnnnnnnnnnnnnnnnnnnnnnnnnnnnnnnnnnnnnnnnnnnnnnnnnnnnnnnnnnnnnnnnnnnnnnnnnnnnnnnnnnnnnnnnnnnnnnnnnnnnnnnnnnnnnnnnnnnnnnnnnnnnnnnnnnnnnnnnnnnnnnnnnnnnnnnnnnnnnnnnnnnnnnnnnnnnnnnnnnnnnnnnnnnnnnnnnnnnnnnnnnnnnnnnnnnnnnnnnnnnnnnnnnnnnnnggtgaatggatggttgggtgaatggctgggtgggtgaatggatgggtggatgaatgggtggatgaatggatggatgggtgaatggatgggtaggtaaatggatgggtggatgaatggatgggtggatgaatggatgggtggatgaatggagtagatgggtgggtggatgcatgggatgcatgggtggatggggcagatgggtgggtggatgggtggatggatgggtagatcaatggatgggtgggtggatgggtgggtaggtgggttggtggatgcatgggtgggtggatggatgggtggatgctgtaagagcctctctggcgggttccagggaggaactggcatctttgaccagcagccagcatggtgatcagatgcagggaggtctctgggtctgcctgatcccttatctcactgttggtgggtctgggctggtggtgtgtccctgaagctctctgaagggtggctctacggcattgcccaggggacattcccagagcgccgtgctctgcagcaaaagagcggctgcctgtgctcccagggccgctcctcctggcagcctttcgggtttgctcggcttagcaccttggcaaatctcctcgagttaggactcgcctgccataagcctctccaacgagcagccccaggccaaggcctgtgtgtgggcagagggagcgcgtgccgtgggaggcagcattaatctgaggttccgtttttgttccctcctggggcaaaaggaaaaaacaggctgtcccactccatccccaaatccagcccagctgcacccagccctgggagtgaagggagctggatcaggactgccgtgagtcgtagactctggtgtagggaaaccctggttcataagacgggtggacatggaggaaggaggagactccgtccagcagagacacacttgggcgcagcccagtttggagtctgatggacgtgggctcacctgtgtgcaactctcattcactgtgtggccacggacaagtgacactctggagacccagcttccttatctgcaaaacggaagcagcgcggcttgggggaggatgtgtgtgagggtttggcccagagccctgccatcagccagacagcagtggctgtcatccctccaggttccagggttacctgggggagtagggcctctgcccccaaatgggccccgtttctggttctggaactcacagcaggagcagaggtgaggacactcccggtgttaaccatccgcccagagggagagcgtcagtggccttgtgtgacctttgccctttgtctctgtctttaggaggcacgcggacctccagtggccggctccggaggcttggtgaccccagtggcccaggtaggtggctcgctccacccaggccccagctcacgggcgtgtttgtgctgcggccccttcgttcttctggtccaggacctgcctccccacctggcctccctggatgaatggggccacttgcccgtttcccagggagacgctgtctttgacagctttggactcaggtggcttccgggcctgtcgacgctgccctgctggagatgatccttgtgggggcagagtcagcaactcccaggctcagggagcaggcccgtgtgtgcgggacagaggagagaacaggagatagataggctggatggtttggtttgaggtgctgagggcacaggcgcaccatggacaggtggctttggctgtgggactctgggtgctggttcagtatccatgggctccctgcaaccctgcagggtagaagacactccaggatagagcagatacggctgtgttatctaggaggaaataagtgggcctctggcagtggtcactgtgctattctttctgctttttccatgtgtttggaaattttccacagtcaccagtagggaggggaaacagacgcacccatcagagctctggggctggccatccaggacaggagttacagctcataggcttggagggactctaccaaccaccgggtacagcctgggcaggggagtgggacagagaggtcagggctctgcctccagcccttgccccccaggactgagtctgtgcgtcatcttctccccactgggtgtcctcgatctcccctgcctgaccctggtgtggccataagtgcctctgttcccaggagcctacgtggttcttggctgtcacttgcagcggccaggctgggacaggtgcccatctagtggcttttctatttggagaggttgatgggtcacagcaatgaatgaacttacctcccctaggagatgaggagctccgagaagggcagagatggcgtggtcatctgtgcatatgtgctgggggccaactgggtgccagacccctggctgccatcatggtggcagacaggcagggactgtgccttcatgaattagccattctagaggagacaaagttaccgaaggacacggacccagagtcaaatccacacaaatagagtacctgtgggccagggctgccttcagaaccaggtgagacagccgtcctgccaggacaaggcactcacgggggcaaggcatgtgcccatctgcagcccccacctccatgctctagaccagccccgtctaatagaaccttctgtgatggtgggtctgttctgtacatccccaccccgccatcctgtagggtagttgcttgaccacctgggtctactgcacactcgaagtataaatgtttaagtttattttattcactcatttacttgcatagaattattgatttattttaaatggatttccacttataactacatgtggctagtggctatgaaacggaacagttccagaccacattggctacctgagaccccagaattctatccccaaagcctgcttctgatcctgagttggcttctgtggggacagcacagacccctcctaagtccgccctccagaggtggatgcagcgcctgtggactgtgcacccccaggcctggcgaggtgagagggtggactgtgcacccccaggcctggcgaggtgagagggtggctttttacaggacgtgggagtggaggggatggcgtgtacatgtgggtgatgtgggaccttgtgtggctatgtgggctgctgtgtccacatgagtgcatgtgaggtcccttgcagtacaggatgggactgtatgtggggagagcggggtgacactctggctggaggcccctgggcagctgcatgattcagcgccatggttaagaggggccccgcctattgcagtcatgttgggcactagccactggacagccccgccgctgctgtgtttctggggagcttttctcaggttccgcatctgatctgcctctccatctccctccctctcattggtcagcttctggtggaatgggtggggagggtcccccagtgcttgtgggggttgcatcttgggagcctggcatcctgggctgcgtggacacagcctcccccggcggttgcttccctctgcttacaccggctggttctgtgccgtcagcacttggcagccgcgatcacagctcagcttggaagcctaaggcataatttgctgaagcccaaagctgcaagctggtgatctgggtttgcgtgggactgcctgctgacacacggggtcctccctctgtgggcctctgtgggctccggcctgagacaccctttcctcatcttcttggcttctgtctttctcactgcctccctgctgctgagaccctggtccacgcaggagttcatttctagacatcccagcatctcaggcctccccatttgacactccccagatgactgtctgccatcccgtcctcccagcccaacttctctgtagatccacatctggccagtctcctatgtctgggactcttgccctccccagaaggacaaaggctcttctcgaggctgtgtttgggactgggccagggatgacatttctggcaagagcttaaatgacaccatgatcaaccctttggtcagctcacacactttgtctcctttttttttttttttttaatggaattgttagagctacaaaaaaaaaaaaaagtaaagaataagataacaaaacacctgtgtactcaccgtcccgcttaagaagtgagacattgcaggtgtagcccagtcctgggtgaccctctccatcccaaccctgctcccgctgcagtgctcacccctggattgggcaggcatgtctgtcctgggcagtggtgtgtctgaggagcctaggtctcctctttttttttttttctgagatagagtctcattctgtcgcccagactggagtgcagtggagccatctcggctcaccgcaacttctgcctcctgggttcaagcaattcttctgcctcaacctccccagtagctgggattacaggcacccgccaccatgcctggctaatttttttgtatttttagtagacacagggtttcaccatgttggtcaggctggtctcaaactcctgacgtcaggtgatccacttgcctcggcctcccaaagtgctgggattataggtgtgagcctggtctcctcttgaatacggtcgtcagcatcgtgtgtctgaacagcctaggtctctctcctcttgaatgccgtcatcagcatcgtgtccttggtgcctgactggagtagtggctgccctgcttgtgcccacaacgtgatggcgtggagatttatccgtgtaaatccacttagccttggttcatttattttggcagctagcgagtgttcctccgtgtggggaggcagagtttgccagtcccgtggcccactggtgacatcaccgaaggtcttctctgttattagtgctgccgggaacgtgtatttccccaggtggatcggttgggctgtggggacgcgctcctcagcccttctagatgttaccactgcgcccttccgagtggccttctggtaggctctcccatatttgcccattttctgtgcctcagtcagcctctctgggcagccgcctccctgactgagcgtccagctgacttttgccctggttcccacggtgtacggagcatttcatctcagtggtgcccgagcttccttccctctggccctcagtccccggctgggatccctggagccaactcctctgcctgacatcccatgtctctgggtcctgctcttccatcttccatgcctctggggtgtgtggcctcgtccccagtgcctccatcatcccttctgtcctgggttgaaccgtgtcccccacaaactcatgtccaccaaaaacctcagaatgtgacctgggagttggaaatggggtctttgcagatgtaagtagttaaggatcttgagatgaggtcattctggatcaggatggaccccaaatccaacgactgatgtccttaaaagaagcagagaggccacagatgcaccggtaagagccacgtgaaggcagcagtggatggtgcagtgatgcagccccaggccagaaagcgcctgggaagaggcaaggaaggacccctcaccccgcctcagagccttcctaggagtgtggccttgctgacaccttgattttggacctctggcctccagcaccgggagagaacccgcttccagtttttcatgccccacagctgtggtccattatggcagccacaggacactgatgcgttccctacctggccgctgtggatgggccacccccgcccgcaggaagtctccctcaagcactgtaggtgtctctgccctcacaggggacgcctgcacaaggaggtgtgaaaagggctctgcaggagcggggcctgggctggtgctcgctccctcccttcatcctacgccagttcccacgcctcttccggaaggagtgcccggccccacccggtgaatcagagcccaactctcctgacaattggctgtcacttatttaactgccaccatccccaggagacagaaaatgccagaggggtggggcctgggcagtgcctcctcgctacttccccgggtaccgtgccacattgccttggtgcacagagtagctgctcaaagtgtgtcggacaaacaggtcccccatgcccagctgtgcagacaaaagtgtgccatgtggagggagctggctgtggaagagaccaccagcatcttggctgcccgaggaccttgcccctgggctcctgtggcacccctagctcgttacttcctttctcacgcatagctacccgctcttcctctatttctctgatgtcagccttgccacccacccaggttcacaagcaggaaatctcagagttgatcttgacctctgcctccccagcacccccaggtcaacaggttgccaagatctcatcaactcaccctccacatactggcccttggacaggctgctctggtcatagtcatgtcttggttgggcctctgtcatccctccttggaccagcgggtgccgtcctccccacccctgtcctgctgtggctccttcctatccacagccaacatttagaggacgattactgcttccctcctctgtgctggggacccggtgataggatccctccacccgatcatttacaatagacctgggcctggtcttcttacttacagagcccttagtttctgcccccaagcctcgagtgtggatttctgctgccgcccagcctgaccctgacactgctttccagcctggagccccctgctgcttctgcgctcctggctctgagtgctcggacctctctggatgggttgccacttgtcctctggaaagcagggcttccgtgctcctggacccagctggctcagggtgactttgggccatcttgccataccccttctatcagcttggccttggttatttctgtgtcctccacggcctccgaccagagccggggcgggatgctctcctggtgtgtggcaggcagtcgggaaatattgctggactgaccttgataggagatgcttgggagaattggccaaaaaactagcttaaaatgcaaatatgggccttcttttgcattggctaaagagtagcttttctctgtttgcctcctgggtaagaaattgatggcaaatgcagtgtctccagggaggagaagaaggtgacaaaaagggtctgtgtaacagggcaaggcactaggcatttgtgactatttaagtttaaattatttaacataaatgcgaaactctgtgccttcctcggtagcccttccacattgcaagcgttcactgccacatgtggctgccatattgaccacagcagatacagaacattgacatcattgcggaaagttctatgggcggtttagatcatcttcatgttggatctgcaaattcattgtttatcccgcgaacggttgctgggcacctactgagcaggcaggatgaaagacacccgctcttgggggaattttctgttggctgcagagaagcttaaactcagggggcctggggcaaactctgcaagggcccttgggctctgcacccctagacctccctcactctgcacaggcagtcaggggccccctctaggaatggagcgccagctctggctcctgtcaggctacagcccggacagatggctgagcacgaggctgtgagagtggaactgggcccggccgggctgcttctccccgttgtcttggtttccttccacgctgacctggaaggactcctaaagcaacaggcctgcccaggcggtttgcatcagtaaaccctgcagcggccccaagggcagagatagctggattgtatttatttaggaacagccaaagctcgaggcacaataaaaagtggagaaagattccggagaggaatgcagctggcctcagcccgggaatccgtcttgcttgggaggctgtaggcgggccaggctggggccagcctggagggtcttggccggctctgctggcaggtacagtagcagggccagcaggagggagtccgggacggagctccttcacttttaattcagggaagcgaacttcagtggttgtctgaggatgagcaggaaatgaatggaaaagtcttttttttttttttttcttttttctttttaggcagggtctttctctgtcccccaggccggagtgctgtggcacagtcatagctcactgcagcctcgacctgccgggcttaagggatcctcccaccttagcctcctaagtagctgggactacagttgtgagccaccatgcctgcctaattcttaaaagaaatgtcttcagactaggcatggtgacccatgcctgtaatcccagtacttttggagctgaggtgggaggatcacttgagctcaggtgctccagacctgggcaacatggcgagaccttgtctcgactaaaaatacaaaaagttagctgggcatggtggtgcacccctgtagttccagctactctggaagctgaggctacagtgaattgtgattacatcgctgccttccaacctgggcaaagggaggaagaaggggccttcaaaaaaaaaattttttttttttgagacagagtctcgctctgttgcccaggctggagggcagtggcatgatctcggctcactgcagcctctgcctcctgggttcaagtgattctcctgccttagcctcccaagtagctgggattacaggtgtgagccactgtgcctggactctttttttgtagagatggtatttctctatgttgcccaggctggtcttgaactcttggcctcaagtgatcctcccactttggcctcccaaagtgctggaattacaggtatgagccaccactcccagcaggaaaagtcactttttaaagcgagaggttgtgcatcctctatagcttggtacttggcatggaggatttactggaacttgtgttaggtgaggggacatggaagatggcaacaaatccaagcccggagcatcagaaagcatcctttcagcctgagatgccttatctccacctccgcgcaggacccttccccagtgtgtgcgcctggagcaaggtggggccgatcctacgaagcctctttcccgaaggcccctgctgcctacatcagcgtctcctggaccgcctgctcctttcctgcatggctggaccagccccaggtcctcctggcctggtgtagggatcacaggccaccctggggaatgcctggtatgtgtcccctcccctctgggtaccaggggatgaagctgtgcttcgtggaggggagctgaggcactagtgcccgggatggtgcgcctggggcagctgaactggacccgtctcctactgggcccctatggagcccagattgttgtgagacggtgacccgtacctttcactttcgtttcacgtgggaacaggggctcagtctgcacacatattcggtttggagcatgaatttccatggagaaggaaaatctctactaagaaggctctgatgtcaggattgtctgtgagggccgggccatgttctggggcaagacaggagtggaggaggcaaccagggaaggcttcctaatggaggaggcatttgatagcatcttgaaaaagaagcagttcctaggccaagccagagggtgaagaacaaccacctaacttctttctacaagatgcccccaggctgaggcaaagcaggttgagtgtgacacttccttcctttctgtgggttctggcctttccggagcccagccagtgccattggagacaaagtggccttcgctattccttcccgccctgccaggccccactgtgcccgctgagccctactttgcaattaagaggagctgtgaaccaatgatgctgatgtcacaaaaaagtggcccggggtctacggggggtgaaggacagagatgccgccctgagaactgtctggaaggggcttttgggtaacagtgcccactccaggttgtaggcaggctggggtgactgggagctgggctcacaggctggcacaactagagtttcccaaagccgtggccctgggggcccttccttcccgggagagcaacctttggtccagtttgggaaaaggtgggttaaaccaagcccggctccctcactgcaggattactcagtgcgtttagtatgcaactgtgcctctgaatccacgacaggaccagaaaccacttcagcagggagggaccacgggggatccgccgcaggggcttgggtctgcgctggcctggtgaggtgcccccttggtgcttacatggaggctgagacaccgtgggcagtgagaggttggcccgtcgcctccccgaccctcggctggccttaccccaccacctctgcactcgcctcccagccggctcatgactaactcctgcctcttcagagccaattggtgctgccagattttccatttcaagtgatcccctgcctgggccaaaatgtttggattttcaggcacggaggggagatggacctcaagccaaaccatgctgggtgaaactgagggtcaaggctgtgctcagcaagcgctccagccctggccgtcaaacccatagtgtgcacagcgtgcgggaggtggccgggtgaatgcactcgtcatagtccggcccctcactcggggctgttcccaagttcccactaccagcctggctgggtcagagcctggtggggccttcctgggcttccctgccccacagcgggagtttgtatggagagtcttgagtgaggttaatgggtgttcttcctcttttttttttttttttgagacagagtctcactcttttcacccagcctgggttgcagtagcgcgatcatagctcactgcagcctcggactcctggcttcaagcaatccttccgcctcagcctcccaaagtgctgagattacaggcacgtgccaccttgcccaactggggtttccgctttatactttttctcttgttgctaaactcaatacaacgaaagatattacatttataatcagaaaaaccaacaagaaatattatttcaaaattggaaaagggattaaagaaacaaaccaagaaacctccgcgattcctgcctatcggagtcagtggttattagtggttggcttaatacaatgttttaggaagaaatagaataacagaaagcagctccagtgagctgagccctggctctgtctgtgctgctacatcagtttcccacagctgctgtaacgagtggccacaagctggctgggttgcaacaacgcccagccatcctctcacagctctgcaggccacacgtccgagatcagggtcaccaggctgaaatcagggtgtccactgggcatagccctatggaggttctagggcaggggttcctgtgtgtgtcctattaggaactggcctgcacagcaggaggcgagtgcctggcaagcgaacgaagcttcatcgtatttacagtcactccccattgcttgcattactgcccaagctctgcctcctgtctgatcagccatggtgttagattcttataggagcgtgaaccgtattgtgaactgtgcatgtgagggatctaggttgtgggcttcttacgagaatctaatgcctgatgatctgtcaccgtctcccatcactaccagatgggaccgtctatttgcaggaaaacaagctcaggctccctctgattctatattatggtgaattgtataattatttcagtgtaataataatagaaataaactgcacaataagtacagtgtgcttgtggccgggtgtggtggctcacgcctgtaatcccaggtttttgaaactctgtctcaaaaaataaaaaaataaaggccaggtgtggtggcttacgcctgtaatcccaacactttgggaggccaaggctggcggatcatgaggtcaggagttcaagaccagcctggccaacatggtgaaaccccgtctctactaaaaatacaaaaattagccaggtagggtggcaggcgcctgtaatcctagcttcttgggaggctgaggcagaagaatcgcttgaacccaggaggcggaggttgcagtgaactgagcacgccactgtactccagcctgggcaacagagtgagactctgtctcaataaaataaaagaatgaatataatgcacttgaaacatctcgaaaccatctccccactccctggtctgtggaaaaattgtcttccatgaaactgatccctggtgccaaaaaggttgggggccgctgccttcatcacctgccccttcgagcctctggtggctgtgggcgtcccttggcttgtggttgcatggcccttaccttcaacaccagcatcttcatatctctccgggccccatctccacttgaccatccttgtctgtgtcgaatctcccgctgcccccgtcttgtgtgagcaccgagactgcctttagggaccacctggaccatccacgtgttctcgccacagcaagatccgcaactgaatcacagatgcaaagacccttgttccaaacaaggtcccatttgcaggtctagggattaggacgtgctatccctggggccattattcagccttctctagtgcccatgatccctccctccctccctccccagcctcccacctcggctgagatgctgtccccatctccctcactgcctggctgcctgtggggctgtcctccaggctctttaggaggaggtggttgcttgatgtctcccagaaggctgggaatggtcctccccaccccctaagaagacgtcctttctgccaaaggagactgcatttcgggtcctatcccaggcagagagtggacgggactgtggtctgaagtggcatttcagggcctttggccctgtcatctagctgagggctgtgcctgggcctcacctggtcacaggtaactcacctggctctgtggggcagggattgtaaactcagaggcctgcggggtgtgtcgaggtggaggggtgcaaatactggaaatttgcgtgggggccttggggagcagcgcaactggaaactgttttgtctaaagggcagagcagtcttacaccagccctgtgtggccaggcaggaaggcttctgtggcgtggccatgcgtcctgcctttctcaacagaagctgacaatctggagttttcagagagattgcctgagttctcagccttggcacgaacacacattctctttaaacaggcttgggccaacagaaccggcctctgtgtctcaggtttgaatgaacccttgaggtgaagcttaaaggcagagaggatgtgcccttccccacccaggaacccacactgtaggcccccacctggtctgctgagcccttggcctcagcatggacactgaccatgtgctggtggggaccccccaggtaagcagcctctgaggaccccggatgaacagtggggaacagcactgatcccccagtggggccccgagttcccggagaggaagactcgctccctcccaggggacggctggagacttactgactcatgcgtgtgtggtaggaatcatccaggaagtccccatcccgttcgccctctgcttgggcggggacggcaactgcctctgtcaccacaggctaacgggacagagcggggtgacttctcagggttcctcctgggcaggtgctccagaacgttttctcagcacgctggcctgaggcacggccgttcctcccgcccagccacgttggggtgcggggtgaagaaagcctgggctagcccaggacagaggaaggcacgcaggaactgggctttttaaacacttaaacccaaggaaatcgtagcatcgcgggacggggaaaatgaaagactttggaagtcgtcaggaatttgactctgtgagttggtttccaagagtctaagttaagcatctccaagtggatattaaaaaggagcagcaagcctcagggcggcgggggctggaggaggtggagagaggaggctgccggaagccgcactcgggacctctgcagccaccgaccagaccgggcagccaggactctgggactctcacaggcagaccctgggggctgcccgactcctcggggcccaccttaggccctctctcctgcctcctctttttggatttctctcctttgctccgtttttcctcccattttgaagagacaatgctacttcagtttggagcacaaacatatgatgagcacatggaaatgtggtaattcggatgcattcgtgattgcaacagattgaagaaattagaccagacaaagagtgtttttagaggaggaggaggaggaggaggaggaggaggaggctgagagagggagggcgacgggggtgagaaaggggaggccgcctctgagcgggacgccgggactcccgccgctgctaaatatatccgtaggaatggagagggaccggatctcaggtaggcagatagccccgtccccatcggccgcccccccactgccctagactcggggctttatttatgcttggggggaataagcatgcaaggggcacttttgctcatttttcacagaaatatttcttttctttttgacggttccaagctcgtgggatgaacgccgtctcagaagctgagctctcctgagtctggcttgtatttaaactccgctctcctctctcctggctacttctctttcattttccagtgtgccactcttgcatgtcatggccactctcaacgctcaggctgttggtactgaaacctggggagggcatgggggacctgcccccctggctcgggtctggggcggcggcgcttggacctggccagtggtttgtttgtccactgtgtggtttgttttttgcctccagccaaagtctgtcttcaaggctgcctcggtctcctacctaaaatagcatttctgtgccttcccggcagttgattatagagggggaagctcccggcgctcagaggagcccggcgtgtgtgtgtgtgtgtgcatgtgtgcacgtgtgcatgtgtgcacgtgtgcatgtgtgcacgtgtgtgtgcatgtgtgtgtgtgtgtccatgcacgctggcagcccccttgcagcgggcacagacccatcggggtgtgaaccggcaaatgaagagaaaggggcttcccgtgtctttagttcaccccagctttccaggccctccctcccaggcccagcctccttggtgtcttcactcacgtgcggtgctgtggctgccatcgcacgtggccagcgccgtcattggtaattagcagtgatgatggtttctgctgcccatgccaccctctgagcccagggctgggagatatggggtggttgaaccacactccaggctttgggtattctgaagtgacctatgggccatggagcaggggtcgctaagagtgtcaacccctaagtgccttgggccctggtctgttggttgcccctatgtgtgtgttggggggtccctgagaggcctgaaagagggaggcccatctcagtgactcctctataggacgcgcagtcccctccaccgctgctcccagggccacatcttgatgtgatgttgggactggtggagcgggtgtgtgttgtgccactgagcacacccagtcgggcacggcaggcggacctcaggagggggccaggggagacgggcagaaggctggggccgcatgttatctgtttgagctcgggggttcaggcccgctgggacgggtggttgtggagcccagtgtcctgctctcggcccagcaggagccgcagggcagggagcactgagaggggccttcatcgggcctgcacagtggagtcgtcctcggagtgaccaccccaccagaccacagtgggtcccctgcctccttggccaccagccctgggaggacgtcacttcacccgcctggctggcaggggcctcggggagcctcgggttcggccttcattttatagatgatccagccaaggcccagatgggtgaccagcaggggatctgagagctgggcagagaggcatgggtttagggggtggtgctccctggggagctggaagtggtggcaccctcccaggctcaccaaacacaagcttttcatcaactgaacaaaacactctttgaaagcagtcagcgctgtgccccagagaccattctgatccctgctgcccttggccaaggacagcacagtcagggatgaagcggggacctcccctcgggctgtgccttgatgaaagatgctttctacaaaatcccattcagatgtgttttcatgtaagaaaacgtacattttaaaaaactcagttgtaaactggccgccttccgaatgaacacgagaatccccgagctgtttccctaacgaggttttcgtcctgggcaaactttagcactggtctttaattgtcactgaactcctgaacagtccctggggaagtgagttccttcctgtccctgctgggtggccttgagcaagccacttggcagctctgggccgcagttccgtaatctgcaatgtgagggatgggagcagccgggcccccaggcagcgccccctcctcctcacgggtttctgcgtgtgttctgagttttgtgggcacttcttccctcgctgaggggctcttgcttttcgcagggtgtggctcatgccactttgtcaggctgcaagccactgtgagagctgctccgattcccacgcgtgttctggcctgaggaggagcgtggggaggatgctgtgcctatgtgacagaggcctgcccggcaggcgccggcccgctggcttccagacgtggctgtgggtgcctcatgccccactgggctggtgtgtgaggcgtgtccagctcaggctgccctatagctgcccagaaagggtttgtgggagggggtagtcctaccctggtgagtccatggtggtctgccggccccagggaaggcctaggagccccaagacctgccctcttgtccctccgttgtccctctgtcggcagtgcctggctccggtctggtttgtcacgggggcctgggtactctcccgccctccctggggcctgcggccttcccctgggaaggcactggagggttcgtcagccgggccagcgtgagtcacgcagcggtgactggccgctgaggcatggaaggccactccttccagccaagggttggagcttttttttgttctggaccggctttgtggcttttacaaattgagcagttttatcttgttccaagagcttgtatttcagcagggagagagtctccaagaagggaactttccactggggagctccgttgggctgggaggttaggaacaggccacgagggagagctgcaggaagagggcgtggacgtctgtgcatggtcatgaatgcaggcccagggtcctggaggggctcagccacgctgttgctggacgtctgtccccaccagggtccacccgatgcagtatggcacagggtaaagcccagctcctcttaggggtttcctgggtcaccagtgggcagggagccaaggccccctggagggcggtacctcagccctcacccctccctcctgtccctcgctctgctgtccctgatggcctctgccgtcccctgggagttcctacccctggacacggggtgctatccggtctcaaactctccagttctgctttttcatctccgatgtgagaggcctggcctgaggcactctgcacccacttcctgcccggccctgtgggaactctggtccctgtagtggtttcctggggctgccatcaccaagtgccacaaactgggtgtctcaaaacaccagacatttcttgtcttgccattctggaggccagaagtccgaaatcacggcatcagcaggcctggttccttccggaggctccgagggggagcctgcttctcgcctccggcagcttctggcggctcccgcaacccttggcgttccttggctcgtggccatatcactcgatctctgcctctgttgtcatggggcctccttctgtgccccaaatctccctctgtctgtctcttataaggacagtctttctcggctttagggcccactgggtaatccaagatggttgcatctcaagatccttaatttcataatgtctgcaaagatcctttttccaaataggccgtgttcataggctctgggtggatgtaaattttaggggccacctttcacccccctgttgtccccctgtgtctggatgcacagaatggttccatgtcccagacccctcgctggccccctctggccctttggggtggccggcggccttttccactcgttcctgtgctcctggtgaggtgtcggggtccggcagcctctgtaggaattctgggggcagcacggagccggcccctccccaccaggcgtcttcctacctgcctggagctcatggttgtgagctgggggggtctctccttgtggttttgatttgcatttcctcaatgcttagtgatgttaagcatctctttgcgtttattgctcatttgcacatcttcttgcagaaatgtctgttcaagtcctttccctgtgtttgatttggatgattgtttttgttgttgttgagtgttaggagatctgtagattaatatccagatactcatcctgtatctgagctacgatttgctgccattccatggattgccttcccaccacgttgttagtgccctttgatatgcagttttttgttttttgttttttgtttttgagatagagtctcactctgttctccaggctggagtgcagtggtgtgatctcggctcactgcaacctccgcctccttggttccagagattctcctgcctcagcctcctgagtagttgggattacaggtgcccaccaccaagcccagctaatttttgtatttttagtagagacagggtttcaccatgttggccaagttggtctcgaactcctgacctcaagtgatccgcccgtcttggcctcccaaagtgctggaattacaggcgtgagtcaccacgcccagcctgatatacaaatgttttaaactttgataatgttccactttatctatttgttcttctgttgcctgtgcttttggcgccataaccaagaaatcattgccaaatgcaacgtcatgaagcttttcccctgtgttttcttctaagagttttgtggttttagctcttgagttcaggtctttgatgcaggttgagttgatttttgcatgcggtgtaagggctggtgcagcctcatgctctgggctcttgatttgcttctcttcttttctcacgcccagctggttctgctgggtggcggggaggagtggggaagtcccgggctgggcctgccctatcatcccctctcaggccagccagggagtctcagctcctgcccaggacctggctggacatgcgccctaccggaaaagcctgggccgcctttctaggctgatggcagggccagcccagggcgtcctgaggcctgccctgcagacatgcccctcatcctcggtggtgtggctgcctggcctgcgtgtgagaccagctgtctgcttcagggcgtggaggctgagtgtttccagcctgtccccttgctcggctctccctctggggatgcccctgcagctcattctctgcctccgcttctgccatctgtgcctttgtctgcttcctgtttgaggtggtcatccctgctgccacccctcatgatctggacaggagtctccgtcctgaagccaccacccgaacccctgtgcctcagacccctcctacccaccacatgggttccactgtgaccaactcagcagctgatggagcttcccttggggctctcctagcaacggggagctggcctgaggcctggcttcagtccctaagtggaagtggggtgtgagggtgtcagcctttttctgctgcctggtgctctaggggttggcttgtcactcctggaagcacttgccatccttacacagcaccccacaccctcctccctgcctcctaccccttcttccaaggggtcatctctgcttccctccccacccaacctcacccacgtggtccgcccagcagcctttgaaccccaacatgacacaacaaacctcccttgctggtcactcattcattcattcagcattgggtgcgccctgtggacttggtgctggggtctgatggagggcaaaccagacacagtccttgccctcatgggactgcaccagtgcaagaccacatcagtacatgtgaaacatgggaagtgacaggagtgacaaaggggaccagtggcaggacaggacctggggtttgtaggaccaggtcaggaggactgccctggggggagaccttcaggctgagcacagaagggtaaggagtaaaccaggctcaaacccggcaggcaagcggggatcactgcaggcaacaagcaatgtgttcaaaggccctggggcatggggggctgaggcccgcagcagggcaggaagggaggctgtggttgaaagagaatgactgtcatgttgtgaaatatacatttggttttcatctccatttcctggcatacaactcctaaaatctttggaatctccaaagtggtgtctttttgaatgcccatgattgacagaccagctggcagcccctaaccagcttcaggatgggggcgggtcccagggaagactgggtagaattacaaggttgagactttcagccccaccctccaacctccaggtaggcgagaggggctgaaggttaagctgatcatcagtggccagtgattgaatcaatcatgccttcgtgatgaagcctccgtaaacactcagaaggagggggttcggggagcttctggagcacgtggaggctcctggagggtggagcacctggggagggcatggaagctctgcgtccctcccccatacctttccctacacctctcttcatctgtatcctttgtaatatcctttataataaaccagtaaattccataagccccaggaacatgtgtaaaagaaaaaaaagaataatccatagctgttctagcaagttaatcctaccagcaccggccttcctctgccaaccttatctctggcaatgccccctctcctgggccactgggacccccccgccccaccacccctcctgtggtggtcttgctggctgctgtcctcaggttagtttatttttacccggcctgtttccaccaggggctgaggcctccctgctcactccagcttcctggcccatctcttgctctgggctccccatccacaccaagtggccagagcttctgaagccgttcgccgtgtgcccctgcctggccccacgcatcccacgtggtgctccccagggtctcccactggcaagggcattggcatgggttctggggctgccttggttcaagcccaccctgactgggggcctgagggtccctgaggggatcccgaaggccagggcaggcaaggctggcatgatctgggcggtgggggctgggcatgggagggggtcgtgggtggggagattcctcttaaccagcggcccacgtttggagactgatttgggctccaggctacgccttgaaattgggacagagagtggcacagatctcagcccgggagcctccctctgcctgtggacgccctcatacctccatccacggagccaccctcctcttttttttttttttctaaatggggaaactcagacttgagcactgaataaacaacactccctcgacatcagcgaagaggcactggctctgaaactttgccatgaaaacttgaacatgctctttggaccgatttgctggaacagatgggtgtgatggggctgcgggactttgggtggcaggaggtgtccccatgcccagggcgtccctgtgcccagggtttccctgtgccctgggtgtcaccatgcccagggtgtccccatgcccaggcaccgcctctccccactttcctaatctccctccaccaacaggtgtcagctgtgaaatgcctgctgtgtgtgtcctttggttgagttcatcttgtgctcttaagttcctgttagacacaggcaggctgctttagttcttctggtgaatatttttttttgttgttgttgttgtttgatacggtttcttactctgtcgcccaggccggagtgcagtggcgagatctcggctcactgcaacctccgcctcccacgttcaagcgattctcctgcctcagcctctcaaatagctgggatgacaggcgcccgccaccacgcctggttaatttttgtaattttagtagcgatggggtttcaccatgttggtcaggctggtcccgatctcctgacctcaagtgatccacccagctcggcctcccaaagtgctaggattataggcgtgagccaccccacctggcctatctggtgaatgtttattggtgcttggcctgtaatgaggagcaataaagacacagtcgctgatcacttgttacttacagtcggaaccgagagtcaggcagcccacaaatgagcaaatccatagatggttttagacgagggctgtgaagatgctgagaacaggttgctaggggtgcatatttgtgtgtgtagggggggattaatggaagcccttcctcagtggtaacactgagttgaagctctaatgaccagaaggacccggccaggccaaaatccaagggaagagcaacccggcaaagggagcggcaggtgtgaagggcccgaggtcggagcctggggaaggtgggagtggctggagagtgttgtcagagacggcagcggtgacaccagtgagacaggcagggccaggttgtgccaggccttggaggccctggcgagggcttgattttattttcactatggtgggacctcagtgccctgtggctgctgagaatggccggtggcaggcagggaggcctgctagaggggaggctgctgcaggccctgcagttggagagggaggatcaggatctctttggagaggaagttggagagggaggatctcttccattgctggacggacccacctgcctggcttccccatcagcatccagcagaggccactcggaccccctcctgttgatgtgggctctgagccatcacctcagcagctcctgagttttggggctgctcttggcaatggcgtgggctcagccaggctcttgggcagcctttcctggattcttcctctgtcctcccctgggcagtgtttctgtttacctggagaggatgggtgggacttggggacaacagggattcaaagaagtcaggagtgggggcacctgtgcagctggttaaagcctaaagccttgtgtcgggagccccgcttgcctctcagagagcacgtggcttgactgtcccagggactgggggagaggcacggccatgcctgtccggcagcagaagggaacccccaggcctgggcctctccgttctgtggcctcgtctttcctcggggttgcaccgtctccctctctgtccccgctgctccagtgctcacgtggctggtggccctgtctgggcttggtctcccgcagtccgccctgcccagccccacacagcctgtccctccagccgggaatcagagctcccctggagttccaggcagcagattcgcggcggtgatacagggctctcagccacgctggcgggccctgctgctctcagggggatgggtgttgctattgacaaagattcaagcactacagcttcagactgaggacagtggctcatgcctgcaatcccagaacttcaggaggctgaggcaggagcatcagttgaacccaggggttccagaccaggctgggcaacgtagcaaggctttgtcttaataaaaaataaaacaataataaaaagaactacaggccgggcgcagtggctcaagcctgtaatcccagcactttgggaggccgagacgggcggatcgttgaggtcaggagatcgagaccatcctggctaacacggtgaaaccccgtctctactaaaaaaaaaaaaaaaaaaaaaactagccgggcgtggtggcaggcgcctatagtcccagctactcgggaggctgaggcaggagaatggtgtaaacccgggaggcggagcttgcagtgagctgagatccggccactgcactccagcctgagcgacagagtgagactccgtctcaaaaaaaaaaaaaaaaaaactacaacttcagaatgattggcttcagcatgtttataaagtcaagggtcttcagtgtcctgggtcgatgtcgctgcgtccgagggagagaggaagaggctggggtgatgggcatgggggcttgtgctccacctggggtaggtggtcttggactgtgcctctgatgtgtttgtcgtggcagggcggtgtccactgaggactggatgttgaggtgtgggtgggggaggttctgaagcactgggcatttctcgtgcactggtgccccgagattgcagagaggggacccgcccagcctggtcagggaggcacgtggctgggaggaaggggagaggaacccggttgcagaaagcctttcctccagcaggtggcgccgcaagctctcgagagtccagctcctgcggggtttgcattttcactgaactcatgggaagcggctgcctgggtgtagtttccgccaactgtggctgctcactgcgggcgagggaagtggcgagtgcagagaatgagaagcaccagagggcagaggaccaccccccgcacaggcacgggggtgcttccttccctgcacaggcaccggggcacgagcccttggggttcctgtcctaactgggcagggaaagggagggttggaagctcagttagggggaaagggaggggtctcctgccatctcttttattttatgtttcctatttttggttgatatgtttcaatcttttacatttttgcaactttttgccataaatgttttcaaagacagaaaagatgaaagaggcgtggtggctcgtggctgtaatcccagcgctttgggaggttgagctaggaggatcacttgagcccaggagttcaagaccagcctgggcaacaggagttcaagaccagcctgggcaacatagtgagatcccatctctataaagaatacagaaaattagtcaggcatggtggtgcaggcttgtagtcccagttactcggaaggttgaggtgacagaattgtttgaacctgggaggttgaggctgcagtgagctgggattgtgccactgcactccagcctgggtgacagaacaagaccttgtctcaaaaacaaaacaaaacaaaaccacaaaaaagaaaccgtgaaagagtctaaagtaaacacccatgcacctaccacctagattccacagtaaccatttttgctgtttgctttaccacaaatccatctggccaccagaatccatgctggttttgatgcacttaaaataagctgcagaaatcagcacacaacatcctgtcaacgcctcagtttgcatttcattaactggagtccggcatttgtctgtgattgtttttgtttttctttgaagtaaaatgtatataccctgagatgcacaggtgtgaaatgttccgtcctttgaattttaacaaatgcatccacgtgtatcccagcctgaccagaacatagaacatcactatcaccccagaaagttcctcatgcccctccaggcgcatcacagcccccttctcccccggggcaaccacagttgtgctttttttccaccatgaaataagtttgccagtttgagtgtttcctcgagctacccatgttgctgcaggtgccagcgctttgctctgtcttattgctgagtaacatccactgtgtgaacactctgtgggtttttagccattctcttgttgaaagacctctggctgtttccacctggaggctcttaggagtaaacctgttatgatggttcttcttgtacaagtttttctgggcgtataggcattcatttattctgtagaaatacctagggtaggtgtagggtatatgtttagttttataagaaactgccaggccgggcgcggtggctcaagcctgtaatcccagcactttgggaggccgagacgggcggatcacgaggtcaggagatcgagaccatcctggctaacacggtgaaaccccgtctctactaaaaaatacaaaaaactagccgggcgaggtggtgggcgcctgtagtcccagctacttgggagcctgaggcaggagaatggcgtaaaaacccaggaggcagagcttgcagtgagctgagatccggccactgcactccaccctgggcgacacagcgagactccgtctcaaaaaaaaaaaaaaaaaaaaaaagaaactgccagatcttttcccaaagtggcccttccatttcacactcccaccaacaatggatacgagttccagttgctccacatcctggccaacatttggtgctgtcactctgtgaaatcttagtcattctggtgggtgtgtagtggtatctcattatggctttaatttgcattggcctgatgactaatgcggttaagcacattttcatgattggctcttcatatatttttcctttgtgaaatgtcttttcaaatctgttgttcattttaaaattgggttgcttgactttttcttctggatactgatcttttgtcagatacgtgttttgcaaatattttattccagtctgtggcttgcctgttcattttcttttcttcttcaagaacgaggtctcgctatattgcccaagcaggtctgaaactcctgggttcaagctgtcctcctccctctgcctccctaagagctggttttacagtcatgagccaccatgcccggcctgttcattttcttaatggtattttccaataagcaaaagtgtgtcactttaatttttgtgaagtctaatttaacaaactcctttctctgtggttctctctctgtgttcgttgtaggaaatctttgcctaccctgccaagttgcaaagatatttatgttttcctctggaaggctgagagttatatagcttctatgaattaacttttgtacatggtgtgaggtagcgggtcagggttcgctttgttgtcattttatgtgtctattcagttgttccaaaattcattttttaagcttttgttttgtatttccttggtgacttatgaggttgcacaattttccaagatgcttattggtcatttacatattttcgtttgtaaaattatctgtccaaatcttacctctttttaaaaattgtgttgtttcaagattgagtgatttctgaaggcttcattttataatgcttgaaagaatgaacacctgttccccaactacaggcttctgctctgtctttgttctgcagcttctcagtggggtaagacttgggttttgttttgttgctgctttgttgctttttatttgattatttccccatggggcttatttaaaaaaaagaattatgttgtttcatacgttttttatatattctggatgtaagtcctttatcagatatatgtatcataaatgtttttttttcatattgttcctttctttttggttttcttaatgatgttatttaatgagcaagagtattttattttcataaagtccagtttatcaactttttccagttttgatttatgatttttatgacctatgcaggaaatctttgcctacactaaagtcaaaataagttctcctattttctaaaaattttatagttgtatattctatgatttcttttatttttaaatttttttaaaatttttaaattttttaaccttttatagctgtcagaatgttctaggatccattttaaatcagtttttgtatttggtttgaggtcagggttaattctcgtttttctgcactcatatctagttcttgcaccatttgttaaaaagacataccttactctgttgaattacctgatgcctttgctaaaaatcattgactgtatatgtggtcctatattagtatatgtacgtatatacatataggccctatgttgactgtgtatgtggtaccatcatagctcactgcagcctgaactcctggacttaagcaatcctcccacctcagcctcctaaatggcagggactataggcacatgctaccacaccaagctaatttttaatttttaagattttttgtacagatggggtctcattatgttgctcaggctggtctgtaattcttgggcttaagtgatcctcccacctcggcctcccaaagtactgagattacaggtgtaaatcactgtgcaggcctgatttttgaatattaaaccaaccttgcatttctggaataagtccaagttgcttatgagatataatcctttttacatattgctaaatttgatttgcccagtttttaaggatttttgcgtgttgattcatgagggatattggtgtggtgttttctttgtttgtttgtttattttggtaatgtctttgtcagcctcattttggcctcataaaattagtttggaagtgttcccttctctttgttttctgtgagttttcataggttgatgttgtttcttccttaaatgtttgatagaatccaccaagaaaaccatctagaccttgaattttttactttgaaaggtggttggttgtttttaatcacaaattcaatttgggggaaagagtttttcagggttttttttttttttacttctccttttcttacttttggtaagttgtactttgaagggatttgtccttttcaggtaagttgttgaatttgctcatttaaagttgttcataatgcaggcatacctagggtttgcttccggacctcggcaataaagcaaatattgcaataaagcaagtcacacaaactgtttggtttcccagtatatataaaatttatgtttaggccaggcacgggggcttatacctgtaatctcagcactttgggaggccaaggtggacggatcatttgaggttaggagtttgagaccagcttggccaatatggtgaaacctcatctctattaaaaatacaaaaattagctgggcatggtggcgcacgcctgtagtcccgactactcgggaggctgaggcgggagaattgcttgaacctgggaggtggaggttgcggtgagccaagatcacaccatgtattccagactgggcaacagggcgagactccatctcaaaaaaaaaagttatgtttacactatactatagtctattaagtgtataagatcattatgtcttattgctaaaaaatgcaaataatcatctgaggcttcagcaagctgtaatctttttgctggtggagggtctgcctcaatgttgatggctgctgaccaggctgtggttgctgaaggttgagggtggtcatggcagcagtttctttgtttcttttcttttcttttttttttttttttctgatacagggtattgctctattgcccaggctggggtgcagtggcatgatttcagttcactgcaacctctgcctcctggctctacctcctgggttcaagcaattctcttgcctcagcctcccacgtagctgggactacaggcgccagccaccatgcttggctaatttttgtatttttagtagaggcagggtttcaccacgttggccaggctggtctcgaactcctgacctcaggtgatccacctgcctcggcctcccaaagtgctgggattacaggtgtgagccatcgtgcctggcaggcagtttcttaactgatgtttgtgacatggattgactctttctttcataaaagatttttccgtggcacgcattgtgtttggtagtatcttactcacaatagagcttccttcaaaattagagtcaattctttcaacccctgccatggctttatcaaataagttggtgtaatattctaaatcttttgttgtcattttgacaatgttcacaacatcttcacttggagtagattccatctcaaggaaccactttctctgcttatccataggaagcaactcctcatctgtcatctgttcaagtttgatcatgggattgcagcaatccagtcccatctccaggctctacttctaattctagttctctgctgtttctaccacatctgccgtgacttcctccactgaagtctcgaacccctcgagacttcaaggaagggttggaatcaacttcttcccaactcctgttaatgttggtatttccacctcttcttgtgaatcacaaatgtccttaacagcatctagaatggggaatcctttccagaaggctttcaattcactttgcccagatccattagaggaatcactaactatggcagacactgctttatcaaatatatttcttaaataataagacttgaaaatcaaaattatccctggctccatgggctgcagaatggatgttacattagcaggcatgaaaacaacattcatctttacatacatctccatcagggctcctgggtcaccagctgggtggtcaatcagcaataatattttgaaaggaaccttttttcctgagccatagatctcaatgattttttttgatggagtctcgctgcgtcacccagaatggaatgctgtggcgtgatctcggctcattgcaacctctgcctcccgggttcaagtgattcttgtgcctcagcctcctgagtagttgggattacaggcaacttgggattacaagcgtgcaccaccacgcttggctagtttttgtatttttagtagaaacagggtttcaccatgttagccaggttggtctcaaactcctgacctcaggtgatctgcctacctcagcctcccaaagcactgggattacaggcgtgagccactgcactgggccctttttttttttttttttttttttaaattgagacagagtctcgttttgctgcccaagctagagtgtagtggcactgtctcagctcactgcaacctccacctcccaggttcaagtgattctcctgcctcagcctcttgagtagctgggactgcaggtgtgcaccaccatgcctggctaagtttgtatttttaatagagatggggtttcatcgtgttggccaggctgctcttgaactcctgacctcaggtgatctgcctgccttggcctccaaagtggtgagattacagttgtgagccaccacgcctggactttttttttttttctcaaattgagacagtctccctctgttgcccaggctggagtacagtggcacgatctcggctcactgcaacctccacctcccgggctcaagtggttctcctgcctcagcctcccaagtagctggaattacaggcgcgtgacaccatgcctgaataatttttgtatttttagtagagacggggtttccccatgttggccaggctggtctcgaactcttgacctcaagtgatccgcccgccttggcctccaaaagtgctgggattacaggcgtgagttgctgcacccggcctcaatgatgggttttaaatattcagtaaaccatgctgtaaacagatgtgctgtcaagtagggcctgtgattccatttctaaagcatagacagagtagatttggcaacattcttaagagccctcggatttttggaatggtcagtgagcattggctttaacttacagtcaacagctgcgtcagcccctcatgagagtcagcctgtcctttgaagctttaaagacaggcatggacttcacccctctagctatgaaaatcctagatggcgtcttcttccagtagaaggctgggacatctatgctgaaattctgttgcttagtgtagccaccttcatcagtgctcttcgctagatcttctgggtaacttgctgcagcttctccgtcggcacctgctgcttcaccttgcacttttacattatagagatggttctttcctgaaacgtcatgacctgacctctgctagcctcaaactttccttctccggctttctcacttctctcagccttcataccattgaagagagttagggctttgccctggattaggcttttgtttaagggaatgttgtggctgatttgatcttctatccagaccactcacactttctccatagcagcattaaggctgttttgctttcttcttattcatgtgttcactggaatcgcacttttaatttctttcaataactttttcttggcattcacaagttggctagctatttggcataagagacctcacttttgcctatcttggctttcaacacgccttcctcactcagcttaatcatttctagcttttgatttaaagtgagagacagctgactcttcctttcacttgaactcttagaggccattgtagggttattaattggcttcatttcaatattgctgagtctcagggaataggaaggcctgagcagagggagagagagagcggggaacagccagtcagtggagtagtcagaacacacacaacgtttattgaataagttcactgtcttatctgggtgtggtttgtcatgtcccaaaaacaactgcagtaatggcattgaagatcactgatcaccggacgcagcggctcgcgcctgcaatcccagcactttgggaggcgggtgaatcacctgaggtcaggagtttgagaccagcctggccaacatggtgaaatcctgcctctactaaaaatacaaaaattagccaggcgtggtggcgggtgcctgtagtcccagctactggggaggctggggcaggagggtcgcttgaacctgggaggtggaggttgcagtgagccaagatcgcaccactgcattccagcctgggcaacagagcaagactccatctcaaaagtaaaaataaaaaataaaaaggccaggtgcagtggttcacgcctgtaatcctagcactttgggaggccgaggcgggcagatcatgaggtcaggagatggagaccatcctggctaacacggtgaaaccccatctctactaaaaatacaaaaaaaaaaaaacaaacagctgggcgtggtggcgagcactgtagtcccagctactcgggaggctaaggcaggagaatggcgtgaaccctggaggcagtgagccgagattgcgccactgtactccagcttgggcgacagagcaagactccatctcaaaaaaaaaaaaaaaaaaaagaaagaaaaaaagaaaagaaaaaagagatcacagattaccatagcagatataataataatgaaaaagtttgaactatttcaagaatcatcatcaaagtcctacacagagacacacagtgttaacatgttattggaaaaatgatgccggtagacttacttgatgcgaggctgccacgaaccttcaatttgtaaaaaatgcagtatctgtgaagcacaatgagatgaggtgtgcctgtattccttatcattgtaatgtcggtaggatctgtagggaaaacacttcattcctcttattgtccatttatgttcaccatctccctctcatcaacctagctaggaggttatcaatctagatctttttaaagaaccagcgttggactccccttttctggtgtccatttccttgagtttctctgttatcttcattacttccttccttgtacttgcttcagcacgttagtcagggcccagtcaggaaacaaaaaccacaccggtaatttgaatagcaacttgaaatataaagtgttcttaactgtaaaaggtagttaactattaaagggatcacaaaggggtgacattgtgatataagaaagatgtatttgggctgggcatggtgcagtggctcacgtttataatcctagcactttgggaggccgaggcaggcagatccctggagctcaggagtttgagaccagcctgggcaacatggtgaaacctcgtgtctaccaaaaatacaaaaaattatcccagcatgggggtgtgtgcctgcagttccagctactcgggaggttgaggtgggaggatcatttgagcccgggaggcagacattgcagtgagccaagattgcaccactgcactgcagcctgggtgacagagggagaccctgtctcaaaaataaataaataaataaataaataaataaataaataaatatatatatatagtatctatctatccatccatgtatctatctatctagtctctgtcccccaactttgtttggcatgtagctcctaaaactcttgaaatctccaaagtgatgggtgtctttttgtttgctaaggaggtgactggtggctggaggctcctggacagcttggggatgagggctggttgctgggggacccagccttgtgattagaaggctagaacttgcagcctttcccacccaactcttgggaggcaagaggggatgaaggttgaattgatcatcaatagtcaaagatttcatgtcatgcttacgtagtgaaacctccctgaaaactcaaaaggatgaggtttgtagagtttcaggttgttgaatacctgcaggtgccgggagggtggcgcacccttccgtggaagctccatgccccttcccccatacctttcttatgcatcttttccatttggccgttcatttgtatcctttgaaatatcatttgtaataaatccgcaattataagtaaactgatttcctgggttctgtgagtcactcaagcaaattattgaacctgagaaggttgttgtgaaggcctccaatttgtagccaagtcagacagaagttgtaggtaacctggtatcttaccacttgtgactgatctctgcagttgagggcagtcttgtgaaacagagcccttaacctatgggatctgcactaaatctggtaggtgtcagaattgaactgaattggaggacacccagttggggtctgctgagtactggagaattgcttggtgggggtgggggtgggggtgggggcagggatgggaggaaaccacacatctggtatcagagctgaagaactgagtgctgtgagtgagaatagaaagatagagtttgttttaccctatacaagaggactctaaggagtatagaaatagcaaatgtaagaagcagctactttagaagaaaatgtaggaggaaagctttgtgacattggagttggcaatgctttcttggatataacattgaaaatacaacaaaataaataaatgataagttggacctcatcaaaatttaaaactttcatgcctcaaggaatactaccaatggcatgaaaaggaaatccgcagaatggaggaaagtatttgaaaatcatatagccaataagggactagtatccagaatatataaagaactcctataactaagcaacaaaaaaataaacaacccaatgaacatacatttttccacagaagacataccaatggccaagaagcaaggaaaagatgctcagtgtcactaataatcaggggaagaaaatcaaagcacaataaaatatgatttcacaccctttaaggtggctgttagccaaaacatggataacaacaaatgctggcaaggatgttgagaaattggagccccatgcattgctggtgggaatgtaaaatggtgcagctgttgtggaaaagatgtaacaattgctcaaaaaattaaactcagaattaccataacatccagtgattccaattctggatgtataccccaaagaactgacaacagggacttgaacaggtgtgtgtacatccttgtttgtagcagcacttttcccataaccaaaagatgcaagcaacccaggtgtccgtcaacagatgaatgaacagacaaaatgtggtccatctgtacagtggaatattattctgccttaaaaaggaaggagaggctgggcatggtggctcatgcctgtaatcccagcactttggaaggccaaggtgggcggatcacttgaggtcaggagtttgagaccagcctggccagcctggtgaaaccctgtctctactaaaaatacaaaaattagccaggcatggtggcacgtgcctgtaatcccagctactagggcagctgaggcaggagaaatgcttgaactagggaggtggaggttgcagtgagatcgtgccactgcactccagtctgggcgacagagcaagactgcctcaaaaaaaaaaaaaaaaaaaaagaaggggattctgacacatactatagcatggatgaaccttgaagacatgctaagtgaaaaaagccagacatgaaaagacaaatactgtatgatttcacttatatgaggtccctagagtagtcaaattcagagagacagaaagtgggatagaggttgccagaggctggggtaagggagaatgaagagggagttggtgtttaatggggatagaattgcagttggggaagatgagatggatggtggtgatggttgcacaacagtgtgaatgtgcttcatgccacccaactgcacacctgaaaatggttaaaacagtacattttatgtggtggatactttcatgtgggtatgcatactcacagaagcagttactacctctggggttgatggaaaagcaaccaagaacttggggcatcctccataccttgccgtgtcttacgttcaggccttgttggagagtgtgtgactgccacagaaacctgcagcctactggtggcaaaaaggttcttgccaggaggtgtagaaagagtggatctgcagaagcagtttattgggtagccgagaaaacctactagggggtatgagtgggctggagctgggtgtctgaggcatttgctggggtccctttgagctagagcttgggtgctggagaaactcagtacagagcaggccccacagggctcacgccactggcagctgtaccttcagaggaaaaagagaccctggaaccaggaagagaagctgctacctcagcaaggcctggcaactccctgcagtgttgtcccctgtggacagagcctgacatgactgtattcagccaaggagaaagatttgtaaggcctcaggccagtatcacggaatattcaggatgtattcagagctaagaggcaatacatgggtaaccggcatttttttttttttttttttttgagatggcatcctgctctgctgcccaggctggagtgcagtggcgtgatctaggctcactgcaacctccacctcccgggctcaagccattctcctgcctcagcctcctgagtagctggagatgccaatcatgcccagctaatttttgtgttttgtgtgtgtgtgtgtgtgttttgacacggagtctcgctctgtcacccagtctggagtgcagtggcacgatctcggctcactgcaagctctgcctcccgggttcgcgccattctcctgcctagcctccggagtagctaggactacaggcgcctgccaccacgcccggctaattttttgtatttttggtagagacagggttttaccatgctggccaggctggtcttcaactcctaatctcaggtgatctgccagccttggcctcccaaagtgctgggattacaggcatgagctataccacgcctggcccatttttccagattcttaaagcagatccttaggttctttttttttttttccccacttttcttcttttctaatataaacacttacagtttccctctaagcgctgcttttgcttcagcctacgtattttagtatgctgtgttttcattatcatttcatttgaaatatggtaaaatttttcttgtgatttcttctttgactcacaggttatttacaagtatgttgtttaatttgcaaatagtcaaggctcctctgagtgtcttagagctattgatttctaattttttttttttttttttttttttttttgagacggagtctcgctctgccacccaggctggagtgcagtggccggatctcagctcactgcaagctccgcctcccgggttcacgccattctcctgcctcagcctccggagtagctgggactacaggcgcccgccacctcacctggctagttttttgtattttttagtagagacggggtttcaccgtgtcagccaggatggtctcgatctcctgacctcgtgatccgcccgtctcggcctcccaaagtgctgggattacaggcttgagccaccgcgcccggcttgatttctaatttaatcttattttggccagacaagcatattttgcatgcttttaaagtttgagacttatggcccagattatgtgtatcttggtgaatgcactgttttcacttgagaaaaaaatatatatatattctagacttcctgagtatagagctttataattgctgatgaggtcaattcctacttaccagtgtttttcagattatctgatgcttgtttctcagatgttgagagaatgatgtttgctgtggcctacctgtttgtgtcccccaaaattcatatgttggagcttaatctctggtgcagtggtgttgggagttggggcatcagggaggtattggctcatgagggcagagccatcgtgaatgagattagtcccttctgccatgtggggacacagcaggaaaaggccgtctctgaagcagggagctacttttcaccagacactgaatctgctggcaccctgattttggacttcccagcctctaaaactgtgagcactacattctgtttataaattacccagcctgaggcattttgttttaacatcctgaatggactgaggtggtgttaaaatctccaactatgcgtccaggcacagtggctcgcacctgtaatcccagcacttcaggaggccaaggtgggtggatcatctgaggtcaggagtttgagaccagcctggccaacatggtggaaccttgtctctattaaaaatacaaaaattggctggggcatggtggcacaggcctgtaatcccagctactcaggaggctgaggcaggagaatcacttgaacccgggaggtggaagttgcagtgagccgagatcgcaccattgcactccagcctgggcaacaagagtgaaactccgtctcaaaaaaaaaaaaaaacaaaaaacaagaacaaaaggctcctactatgattgtggaattgcccatttctccctttaattctttccggttttgcatcatgtattttgaaactcctttggttaggtgcatacacatttatgattgtaatggcgtctcaatgaactgatcatttgcaatcatgatgaatgtattcctttatctcataataattttatctaggactcaactttattgatatttatgtgacctctccagccttcttatgcatgctgtttgggatgtgtgagaaggctggagaggtttacggagaaatttgtgatggtttgacctacagtttttcaactttactatggtatgaaagtggtatgtatacagtagaaactgtacttcgagtatgtatgaaaccattctgtttctcactttcagtacggtattcgataacttacatgagatagtcaacactttattatgaaacaggctttgtgtttgttgattttgctcaactgtaggctaaggtaagtgttctaatcatgttaaggtaggctaggccaagctagactgttcagttaagttagatgttaagtgcatttttgagacgatatttgttttcaacctatgatgggtttgttaagacataaccccatcataattcaagcagcatcagtatgtctttttccaaacagagaatttcagcctgtgtttatactgaaacagcatcttttgtagacagaatatagttgagtcttgcttttatattcattctgacagcctctgccttttaattggagtatttaggctatttctgtttaacattagagctaccaccttgctctttgatttttatttctttcatcttgctttcttggcttcttttaggttaattaaatattttttagaattctattttaatttatgttttggctttttttttttttttttaaaacagagtctcactgtgttgcccaggctggagtacaatagtgtgatctcggctcactgcaacctctgcctcccaggttcaagcaattctcctgcctcagcttcccaagtagctgggattactgatgcccgccaccacggctggctaatttttgtatttttagtagagacggggtttcaccatgttggccgggcttgtctcgaactccagacctcaggcaatctgcccaccttggcctcccaaagtgctgggattacaggcatgagccaccgtgcccggcctgttttgactttttaattgtatctcttggtattgctgttttagtagttactttacagattctattgcacattcttagcttttcacagtctacttagaattaacattgtttttcttcatggaaaaaaaatgtaagaactagacaatcctatgggttcatttaccacttcccatcctgtatgtgatggttgttagatatttactacatccatatacattgtaaactagacaatacaataatggcatttttgctttaaacagccccatgcattttaaagaaattaaaagtaaagcagaatcttttctatttgcccatgtatttgctatatcctgtgcttttcattccttcctgaaagagctgagttcccatctggtctcatttcccatcatcttggagaacttacttcacagtttttgtagtgcaggtttgtagacagctgattccctttcattttcacttacctgcaaatctttattttgctgtctttctttccttccttccttctttccttccttctttcctttcccttcttttcttttccttccttccttccttcccttcctcccttcctcccttccttccttccttccttccttccttccttccttccttccttccttccttctttcttttctttctttacagagtctcactctgtctcctcacaggctggagtgcaatggcgccatttcaaaactcctgcctgatctcaattcagcaacctctacctcccaggctcaaacgattctcctgcctctgcctcccaagtagctgggactacaggtgtgtgccatcacacctggctaatttttgcatttttagtagagatgggatttcaccatgatggctaggctggtcttgaactcttgacctcaagtgatctgccttccttggccttctaaaatgctgggattacaggtgtgagccactgtgcctggcctgctgtcattcttgaaccatcattttgctggttatagaattctgagttgtcagtttttttcttccaggactttaaaatgtagggttccagtgtctttggcctccattgtttctgttgaggaatcagcgttcatctagctattcccctgtagaccacatgttgtttttccctggctgcttttaagaatttttattcaagttaattgctcagtacctaccttcaggcaaaaggcctcaagaaaccagaaactcatctgggtttcttcccctctgtcaggtgtagactccactccagcttctacctacttgagatcgtctatactgactccaggctgttgttctgttttgttcttttaaatattttgtccagagctataatgttttctgtagaattgaccagatagcagctactctctgtgaccaggagccttgatcttccagacttgctgatgggctcccaaagctcctgcccatgaccctcagttggcagtggcttccctgccatgaagttgtcgtgagcgtataaaacctacaggctcaaccttctcattagtacagtccagaaaagtggaattcctggtctgggtggctgtggtgccgtaggtcactggctagaccagggtggtgacttgtcagctggctgggtgtggggcctccagcctagcacccttggactctaacctaggagttatggctgtttcagggccaggggcctggcctcagcccctgtcccccttctgttctcaagttgcccagcatcaggtcccaaccagcatctttcgcagacagggctggtcggctcctcactagagggccagggttgggagggaagcctgttgaaccctccttcccatgcagcccagggccctgtggttagctccagaggggtgcagaaaggaacccccaaaggcagaaacccacccttctctctgttcttgtgcttccagggataaaggagaggtggtcctggttgggggctaccagtggtgtccaggaggcccacatgaccactgtttgctggggcctttccttctctgtgctgagagagagagagaagagataagagagagagaagagaagagataagagagagagaagagataagagagagagaagagataagagagagagagagagtgagtcagggtagtgtcttcttccagtaacgcaggcatctgcacgtgttctctgggagaaatctcgtcactcactagagctgtagatctggaagaagctctgcctctctttcctccagcgcagtgtgtgtgtgtgtgtgtgtgtgtgtgtgtgtgtgtgtgtccacgtgcattatactcttctacagaggaaataattcccgtccaagtgcacaggttgggattttagcaggcagcaggagggctaaaggagcaaagaggaggaaacgggggtgggagtgagggtgggaacaggaggtgggtggatacgaggagacacgccttccacacctagaagggctggtggagatgaccagaatgctccggacagatcttttatcaaacttccaaaattcaatcttatttcatgaagcctggggcccctgcagagtggaagacaaggaagggctttcctgcaggggggtatgtgtgcatgtgtgtgcctgtgtgctgtgtgtccccatgtgtgtgcatgtgtgtgcctgtgtgcccccatgtgtgtgcacgtgtggtcctgtgtggtgtgtgcctgcacatgtgtgcacgtgtggtcctgtgtggtgtgtgctgagtgtgtatatgtgtgtgcctgtgtgctgtgtatgcacttgcacacatgtacacagatctcattttccttttttctgtcttcctaaccgccagaaagaatttccgtgaacctctccacccttcccaaagctgcacatggagggacttgtgcaggcacatgtgcgcacgcgcgcacacacacacacacacacacacacacacacgagtcaggggcaagcactcctgtggattgtacctaggtctggcaggaaaccgggttctgggaaactgtaggccccacctttggcagaaaaccatgtttttgttgctgttcattcaagggaacattaagtggggctggggacagtttatgttgagaagagcaaattttgcctatggcattggggacattgagcggctcctgtcctgggctctggaggacttgggagacacgtctacagctctgggcatctctcaaggtcacgggtggccacactcaaggttaggccctcctctgtgtgagctgcggtcagcaggaaggccgacctcagagacgtccccagggcccttggaggccctgcccctgagtcctgggccaaggtcagagagccgagaaggctgccgctgaggactctggctggcgcccagcccagcagcccatcaggcgggcccagtgcaggggctgatgaagtcagctgggaaatctgtgaaataaagcacaggtcccccaggcttgcccagagccccagcatcagatgaggtgcagagaagggaactgagctgccaagtgtgaatgggagagagaagccccaggaccatgcaggggccccgacatggcaggtgcttggtcagcggcagtgctgcccttactgctggacgtgggaaaatccactgacacttgctgaccatagccagggtgagcatctgggtgaccctgcagatgagacaaaataagggctgccttgggggaggggcccttgccgggccatcctgctgaggccctgtgttaccgtcctgtggctggcataacaaaggaccacaaacatccaaaatgtcttccctcgaggttctggagccagaaatcccagaccgaggtgtctgaaggttcattcctcctggaggttccgagggagactgtgttccatgcctttctccgagctctgcggtggccagcaatccctggggttcctcggcttgcagctcggcctccctccccacctggctttctccctgtgtctctgctggtgtctctgtccaaagtgccctctctattgtctttttcatttatttttagggacagggtctcactctgtcctccaggctggagtgcagtggcatgatcatggctcactgcagcctcaacctcccaggctcaagcaatcctcctacctcagcctcccaagtagctaggacacaggtgcacgccactatgcctggcaaattttttattttattgtagagatgagggcccaggctggtctcaaactcctgggctcaggcaatgaacctttgcctcccaaaatgctgggattagagagatgagccaccgtgcccggcctgcctccgtcttataaagacactggtcattggatttacggcccaccctgattcagtatgcccacaaataacccaagtacatcttcagagaccctgtgtccaaataaggtcacattcgcaggtactgggggtcaggacttgaatctgtcttttgggggaacactatctaacccaccacaggtctcacccacagaatggcctctctggcatgtgcacaggcgggtgaggggcccagcagagggacctgcgtggcgagagggcttcggtttatttcagggattccagaaggggactggatggggtggctgcatggagcaaggggctacagccactgtgtccaagtagtcagcgagttgtcaggtagaaggggagcatttattttgagttcccccaagatatgaagctggtaccaggtacctggaaggtactagagagtagagcttgactctttacagaaagagctgtttttctcacgattttcactttaggatggtggaacaggctatttcacaaagtagtgagttccccatgcctggaagcattcaagcaggggccatgtgggagttgttcaggactgtatagaagggacctcagaggtccctgccaataccaagagtcttattttataacaacttgaatttcagagtgcagtgttactggggatatgtctatgagagggatccccaccatcaggccctacatactatgcatcatttttagggcagaggatgagagcaggctccattctttttggttgcctatgaggaccaggaagctttgctgctacagcagcttcctgtggaaacagtgtctcagccccacaatccattcatcggagctgcaacatcttaattaaacactgtgtcagacgggttctgggcatgtgtgtgcagattgtcacaagtacatgagaatgcacacatgcacgttgcatgcttgtacatacgtgaatgcacacatgcacaagaacgcaaagacccgaggcagctatagtctatgagacagatccctctaggctgaaagactccccacaagggtccctagaacaaggccccagcctcagcggtccctcccacttctggtgggaggatctcaacagagaagaagggtcaagaagcacagctcttgatgctcacggtgtaccaagctctgctttaagcttgcgtcctatgttttacttatttagcaaatctatagctcttgttttgtgccgttctcagcactttacaaatattgatgcatgtttgtttcatgacaaccctgtgaagtaggtagtgttaccctattttatagatgaggaaactgaggcatagaggtatgaagggacttgtccaaggtctgtctctgccttacatgcacgtgaatgctcactgatgcggcggccgctggtttccctctgatgtgagtcaggccttgagctggtcggggtctgggtcccgctttggttgtgtttcgctgtgggcagcaaggaagcttctagcagcctcatctctctggtatggcctagcttcagggtctggatttctccaaatgctcctgcccagcctggagcctcctttccagctaagagagggctgaacgacccctcactcctggaggctgccggagcccctcctgcctgcatgcggccgctgccgggtggacaggcctgcttgtgggttgaggctcccagcagctgtcaggagaggaaatgccactggggtggatcatttctcctcctgggaagctttgggagaagcagctgagggggccagcatcctcctgaggccgattccctgctccccccagcacaggcacgaagctatctttgcttgtttgccacaggcagcggagggcggtgcaatggtgacgtctgcttgttgcactttgcgtccatgaggacgttgatccctggctggtgctgggcgcttgctcttcagtcatcttgccctgacctggcgcggcaggcccgagcactcctcttttacaaggaaacaggctcagaggccttgagtcactcgcccagactcccccagccaatgactggctgagccaggatttccatccagctctgtgaatccagaagtccaagttcttcccatcacgtccgggccaggaaaggattagagtggttttctacaagccgattattcggatgatctctgcagcttagctcactgtagttgctcaataaaaacgtggaatgaatgggcctatatgtccccgttgccctgcgtgaatcagagccaatggttctggctgatcctcccgtttccattccgtggatcagtgtctctctttggcgtgtgtgaccttggaatcagtgactctctccatcccaccttgaatggtgtctgcgccgcagcaggggagcagctggggattcccagtgcctgttgctggtgggctgtgcgccagatcccggcgcggttgtgtgggtgattgtcagccacatgtgtgtgaagggctgtgcatgtaggatttgtgcaaatgtgcccctccctgccaccagcccgcaggaggctgtcaagattccgcccctgcacgttggcccacactctccttgtggccccgctgctgtggctgttcccttgtgtcacgtggctgcatgcaaagcccccacgtgggtggggatcgtgggccgaatgtgcatcagatgcccctgcttcttggtgggtggagaccctcgacccacgcaccgtggctgccacatctgaaaggccttctatggtgaaggacttaggctggacctgagcaaccctccgcggaggtcttagaagtgctcctagctcttcctcctgtagtgaggctctgagtttccgtcctcggaagaaaacctggctggggaaggcatccctagacctggacataaacgccaggagaccaggactcccctctcgggtgaccgatcacagagactcggggaaagtcacgtttggaggaggtgatgctgcgtctcagcctcattcttttctcattctacagacactgcctggtgcccagcccatgccacggggcttcctaagcagctctgggcaccctgcacctggcatggcctccagccccatctccctgccttgggagacctggtggggactccgggcccagctcctgtggctgtggaaacttggtggtttatcctggtggctgaggacagggatgtggggttggacgagttgaatgcaactcccagtggctccatgtactgcctgcgggctttgcgcagctctttcccactatgtgcatctgcttcctcatggaaaaatgggggccagggaggagcgacctcgaaggtattcgtgggaaacaagcgaggtgataaatgtagtgtccttggtagagcactggacacagagtccacccccacgaagggggctgctcctcctccttctgtgtttcctcttgttcttatttctcgtcttctatcttctcctgtttttacctcccctcctctccgcctctcccctgccctccccctctcccttcccctccccctcgcacatgcaggcacactccagtttggtgccccaaatgcctttctccattgtccttctgaaagtggttctctaagtgggaactcaggcctagaaagggtgggcaccctgcctggtgggctccggcaggccaggccctgagccgcctcaggagacacaaccccaggaagaggctcatgcagcccagctgtcatgatggactattggtgggagaggggaaggtgccatggtaggagaagctttggaaacattcactagtggccttatttatgactcaggacacctgccaggtcactagaatacagctaaggaagctgtcggccagacgtccagaagtgtcaacctggtgactggacaggcagacgaggtgtagggggaaggggctgacattcactcagtgtctgtcacacactgagggcacaaagggcaggacggagagctggcccatgccacctgtggaatcttccaggtgtgggggcaggtgggcagaggggcagatggggaagcaagggggcttgaagacatatgtgctcattaaatgtccttaaatcccgagaagaagaacgaggacacatccacactggcagggctgaaactatgatacatggattttgggggtccgctcctgctgcaacagctacagtgactccctcttacctttctcttccctccattctattgtgaaaatgttcaaatacacagtcaagttgaaagcattttacagggaacacattcagccatcacctagattctaccactaacaccaagttacacctgctttatcacctcgccatccagctatccctccttcccctggccatgaatccatcttatttttacttttcgatgcatttcaaagtaatttcgggtcaccctgattatctctggaatcactgtcagaaattccctcccctcccctctcctttccttcccttttttgagatgggatcttgctaggtcacccaggctgaagtgcagtggtgcagtcatagcacactgcagcctccaactcccgagctcaagcaatcctcctgcctcagcctcccgagtagctgggaccgcaggcatccaccaccacacccagcttcattttcaaaatttctcaccaactctctgctccttgtgttcatcttggagctggaacagacgtcgctagtcaatcatgatggctgctgggtgcactggctaacatctataatcccagcactttgtgaggctgaggtgggaagattgcttggggccaggagtttgagaccagtttgcgcaaattgcaagaccccgtctctacaaaaaatacaaaatgtagctgagtgtggtgacacctgtaggcccagccccagctactcgagaggctgaggtgggagaatcgcttgagcccaggaactcgaggctgcagtgagctatgactgcaccactgcactccagcctgggtgacagagcaggaccctgtctctaaaaacaataaaataaaatcaaagttttaaaatggaaacgaaaatcatgagcacataactccagatgtatcctcaagatagcaaacccagatgggcacagtggctcatgcctgtaatcctggcactttgggaggccagggtgggtggatcgcctgaggtcaggagtttgagaccagcctggccaacatggtgaaccccatctctactaaaaatccaaaattagccgggtgtggtggtgctcacctgtaatcccagctacttgggtgactgaggcaggagaatcgcttgaacccaggaggtggaggttgcagtgagccaagatcacaccattgcactccagcctggaggaaaaaaacaaactccatctcaagaaaaaaaaaaatgcaaacccagggccaggtctgtagccacatggccaccttcctccctgagtgcggaggcagcctcagaaaactgccccacatcacgtcagtgggcagttgactgggtcggcctgccagttgaatcctatttgctacagccattctccatagcaagggggtattctagacataccccccttcccaggaaagaataagccatagctgcctaagcgtttcatgcagtgatatgcacgtcttttcccaactctgtgttcagtgatgtcctgttggtagcttgaaatttgctacagtgggtgtatttacaccacaggaattggcaaacactacatatcaggccttacctcctgctccccactagggtaggttgttaaacatgtacctgcctgccactgtttcagtcttgtttgtctttcatccttttttttttttttttttttttttgagatggagtcttgcactgttgcccaagctggaatgcagtggtgtgatcccggctcattgcaaactctgcttcctggaatcaagatctcctgcctcagcctctcaagtagctgggattacaggtgcccgccaccacggccagctaatttttgtattttcggtagagacggggtttcaccacattggccaggctggtctcgaactcctgacctaaggtgatccacccaccttggcctcccaaagtgctgggattacaggcgtgagccaccgcgcccggcctctttcattctttcttagtgaaaaaccttcctgaaagaatgcctactgatttctgtgtcaataggtaccgcctgctggacagagcccgccctcctgttgacggtcttgctctgtctgggtgaccattctgcatgtcactccctgctgctcagaactaaagctgtagtgacgcctggggtgggttgggaaaacctgtgggaatcacagtgcctgctgtcacgctgtgttctggatacctgaagcttggcaggcaggtgggagtgagggtgggcattgggaaagtgatgtggtgctacaggaaggggacataggtcctgagactttaggtccccaattggacaaagctgtttttttttcctggataaatgttctggcttattcataatagagtggtcagttgctgggccttgcacaccttgctggctctggagaccctatgcaccatgtagaccctgttggtgtcctccccccagtgttgggggaggggccaagggcctgtcgatgtgttgacacctggccattcactggccttgaatgtccacattcacctccttgaaatcgatgctccctatcggaggctccacctggatatgggcgcaggcctgtactccaggggtggctttcaccaatcaggcagaatccctgccctgccatgccctttgggctctgcaactccagatgtgtgctccagatctgtggttgcatggatgggacaagccacggagactcagactccgtggtccctgtgaccagagtagccgtggccctgtctgggaatgttcccgccctgttgctgaaggtgagaaatttctctgtgctggagaacagctgtgccgagaagttggcccatctggcttgcaggactgctggagcaagggaggtctgttgctggtctcttccttcctcctctgactgggtgctcctcgtctaggttccttgcagcaagagaattctctaatttattttgcccccttatggagtctctgctccatgaagcccacctcctgatcccagctgaccggctcccacctcctcaagaggaaggccggggcggacgaggctgagactgtgccttcgcagtctgagctgctgctgctgtgtgttcacagggctccttcagcttttaaaaaggcttcccttcaacacgttcatcacacacttggggctctcctggatgccacacgaactcagtaaggcctgcgttagaggctgcccctgaggctgtgaaaatagaagaagggtccagagagaattccttcatctggcaatcccaggaaggcttcctagaagaagcagcctctgagctgagacctgaagacagatggggcctgagccaggccagagagggtgggaagggcccgccaggcagagggaacaggatagggcaggcacagaggtctggcacctggcttgtggggaactgtgagcccctgggcatgaccaaggcggggagaagcggtgtggggggaggcagatgtggccggcaggagatcggcggccccggccttgctaagctctcactctgtctttagcaggtgacagaagctgcccaggacagtgagcagggaagtgacttggtcatcccatcaacagcctggagtccagcttggggggacacaagaccctggggaaggcatgagtcaggggcctgctagagccaggagctggtgggagatggaaacagtgttgcttatgaattacagacagacactcccacaactttctctgacatgatacaatctcaaagtgggccaccaagaggtgggaaggtggcgtctggctctccaggccttgggcctgttttttttttttttttttttttgagatagagtctcactctgttgcccaggctggagtgcagtggtgtaatcttggctcactaccaactccgcctcctgggttcaaacaattctcctgcctcagcctcccaagtagctgggattacaggtacctgccaccacgcccagctaatttttgtatttttagtagagatggtgtttcaccatgttggccaggctggtctcgaactcctgacatcaggtgatccgcccaccttggcctcccaaagtgctgggattataggcgtgagccactgtgcccagctgagcctgtcttcatgttctccctggccctccgtgtttctgtattagttcacccttatggctccctgctttaaagagtctcccttaagactgtccccaagtggacaggtccccagaaccaaggagcagccttaggagtccccagttacagacactacagggggtccgtgtgacccccggcctctggtctgggcccggcagccttgctcctttgtgctggtctgtccctcgcatagcctgaccagagctggccaggtcccttggctgggccgagtcatcacggccggtgactcatgcagagggagaaaagtcggggggggatggagtgcgagggaggactgtgttaatagcaaacccattacatccccgaggtcacttcacaggagggacaaacggttcaggttcatttaggttgatctggctgccggctggcttccagcgacactcagggtggggaagatttcattatccagggaaagcaataccagattgtctggaggggcccagccagcgcaccccgcgcttcctgtctgcctcccacgcagagcgttctgttcccaaggcggcaggccaagagtgcgagctcaggtgcagagagggtgcggcatgggggctctgcagggcatggggtgcgtgcatttttattttattttttactaagtgttagggtaatttgttaatgggatacatttggtgacacaaaaccttctgtcagttcatggcagactggaatggagtggaagcatcccatccctggggagccgccacacacatttggctgtgaacgtcggtgcctttgcactggagcctcttttgagtgcgctgggcagagcagcgaggttcctcttctctcttctccatcatcccgtggaggtgtcaacatgtagccagagatggtcactggcagtgaggagaggggggcagggagaggccagggctgggggcttgccagcccacagttctacccctgaacacccatgacctccttgttcaggtcagtgaggccgggggcagagacaggcagggcctcccgatcccgagcatctccctcctccctcatactctggatttgccctctggagaaagctttggagcacccagaagtcctggggctgctggttgaggtagggagcagagcccagctgtgcctggaggctccccacttccactcagcctccagggacagtctcagctgtgcaggcccaggccgctgaggctggctccagaaatttattcacagccgccactggatggaaaacctgttctctaaagggccccagagccagttttgttccttcttccacaggctcccatagtcagagcatcgggtctttgttagagacacagaagagatgatgtccccagcccttatggggttcggtctccactgtggatactggtgatcttagtctccttctcaaaaccaagggcgctgatgccccaaattccaggcccccagaaagagctgccacccacccacactgccacgtcttctttctacttttctgttccaggaagagtatagtggatatgtgctcctgtagaaatccatctacagcctgactgcagatgtattttgctcccttattgaggctctgctccatgaagctcaccttgtttgttcctctctctttcttcccttcctttcttccctccctcccttcccttcccttcctttttctttccttccttattctttcctctctctctctctctctccccccttctctgtctttcctatcttttctttctctcttttctcgttttgaacagctaaagatagaatgagtggcataggtaggtactgagctccctgtaactggaggtgttcaagtgtagggtggatgggcatttatggggcaggcattgagggaggatcccctggggttgtggatggcaggataggccctgtggagccttctgagcgggtgcagaagagggagggcatgttcctgctccctgcccttcccgggttgcctggccgccactcccaacctccaccctctttccttccacctgctgggacttatgggatggacagaggcgttgttagaacacggagccaccgtccacagacggccagcagggaggagggctccctggggatgatgtcgcctcagtcactgtggtgactttaaaaataaatgctttcttctctgcttgagtccctgttgttcctgctgacgtggaactagggcaggctggtgactcagccgtcgtccctgcactgcatcggtggcaagttgcctccagcctcagaccccacagagcagggtgcctccttgagaaaaacagtagggaggccaggacaccaaggccccagggacagcctgtttctcttggctggcacatgttctagccaagcctcctggcaccctgggggtgaggaggtaccagctgtgtgccttagtcactggctgctttgaggctgggtcggtgccaggctggccactccttcttgtccccgagtgtgactttgcagagctcccggaagggtcagagggtttttttccatcactggtgtccatgggatactgtgtccccatctcatttctgtactccattctcagacagtgctaggaagttggagacttgagccatttcaagaccgtcttgtggggctggagtaggaacaggagtaggaggaaccctctggtcacgggactgtgtgaagagagaatgatcaggaagaagacatgagccatcatgtctgggttatacctcagcagagccactggtggactcccaggcatctgaatttgctaatcgaaaagctcgccggatatgcaaataaacaaacactgttcaggaggcacagccagggttctgatggtgagggatcatcttggaggggtcataattcccacccagtccttcagtccttctgtcctctgtgtgtgcagcccctgaccaccaccccccccccgcccccaccacttgctcccagggttccatcaggttggatattattgcagtaaaatgtagcaacaggaggtccaggcagtgctgcactctctggtcctatcatcagagccagcaggcagcagggctggggaactccaagctgattcagtcccaagtgctggagtgggtagctcggatgaggtgggggtggggaccggggagccatggagcagactgtttgctgtgcaggccaggagcctccttgggagagcatgaatttagaacactaatactttgtttaaaaagtcccctgccttggagataagagctcaggccgctgtggtcaggttttgctgtaaatgttctgcacaaagcaggctggggggatcactgggaagtctggggaacagattggtcatgtgcttctttgagtgaaaccttatggttgcattgaatcggccagccagagggtgtgatgggttgtggtagccgcataccgggtcacagtcaggctgaatggggaaattcaaactcaggtagcctgaaagagacttagtggtccacagcctggtagctgctcccagtacagctgatgtaaagggagaaggggttccaggggcttggccttggtggaaaccacgcactgtccatgatcctgggcacgtcgaggctggggcaggtctgcctggtggctggcagaacgcacatgaagagtccatgtgtgttctgaacgtctcctctgcccctttgggttcatgccccatcaggagtctcctgactctgccattctgcaaagaaaactgcactttgtcactgcacaggagtgaacaggtgtgtgtggagtccctaaagccactgtctcaaggggtctcacgggacactgagagagttgctgtgatgtttaagactaaagtgacagctgggcgcggtggctcacgtctgtaatcccagcactttgggaggccgaggaggatagatcacttgaggccaggagttcgagactaccctggccaacactgtgaaaccctatctctactaaaaaacaaaaattagccaggcatggtagttggtgcctgtaatcccagctactcgggaggctgaggcaggagaattgctccaacacaggagatggaggttgcagtgagccgagatcactccactgcactccagcctgggcgacagagtgagaccgtctaaaataataataataataataataataataataataataataataaaataaaagcaaggacttgaacaaatatttacacactcatgtttgtagcagctttattctcaattgctcaaatgtggaagcaatggaggtacaaagtgtgtgtacacacagtggaatatcattcagccttcagaaagaatggaattctgtcacatactacatgtgaaccttgaataatgaaccttgaagacctcgtgctcagtaagcctgtctcacaaggacaaatgttgtgtgatttcacttacatgaagtcaaattcatagagaaactggaatggtggttgccagcagccaggggaagaaggaaggatggggagttactgtttaatggggacacagtttcagtttgggaagttggagaaagttttggaggtggatggtgttgatgggtgtacaatgtgaatgtacttaatgtcactggacgtgtaaacttaaacatggttaaaatggtaaatattttgttgttgttgttttttagacagagtcttgccctgtcacccaggctggagtgcagtgacgtgatcttggctcagtgcaacctccgcctcctgggttcaagcgattctcgtgcctcagcctcccagatagctgggattataggcgtttgccaccacgcctggctgatttttggagagacggggttttagcagagactgggttttaccatgttggccaggctagtctcgaactcctgacctcaggtgatcctcccacctcagccttccaaagtgctgggtttacaggtgtgagccatgatgactggcctaaaatggtaaattttatattacatatattttatcatagtaaaaatgcattgctctattagaaaaacatattgctttattagaaaaatgatagatttatacaatatgaattaaattacaagttatgaagaaaaattaagcaaaaaattaaaaaattacttataagtgattatatttaaaacaaaagataataaatacacacctttcatcacctcttaggttttttgcaacatttaactattgtctgtcctgttgcagttatgttcttgaggctgtttttgtatgatggaagcactatattggtggtaactaaatatctcttcccagtctcacctccaatgatgttatacaaataacttgaaattggccggctgggcacgatggctcatgcctgtaatcccagcactttgggaggccaaggcaggcagatcacctgaggtcaggagttcgaacccaacctggccaacatggtgaatccccatctctactaaaaatacaaaaattagccaggagtggtggcaggtgcctgttgtcccagctacttgggaggctgaggcaggagaatcacttgaacctgggaggcggagtttgcagtgaaccgagattgcccgactgcactccagactgggtgacagagcaagactctgtatcaaaaaaaaaaaaaaaaaaaaaagaaaagaaaagaaaagtaagaaattggccaaggcagaaatactgacatcgcaggaataggcaagtgctacaaatcgggaaattgaaatcgagtgttgttgcttttgcaggtcccaggtggccagttgttgactgttagctggcacccccctggaggagggaggcttagactgattcgcagatagactggaggtagaaacgcaccatggtttggatactgagggtgagggaaagagaggagtcaacaatggtgcccagagacttcgcttgaccaactaggtgggtggtagtgccgtttcctaagatgaggggctgtgggaacttgaggggctgtggaaggccctgccactgatggacccagggctcggcagctcagggaggcctactttgtgtcaggccacacagagacaagaccgtctgggccctgcccttgggaagtctccgtctgtgaggacacagcccgccacctaatggggtgtcccgtctggagccttgttgttgctgggagagagccccccaccttcctccgctccccgagccccttttgcttcatcgcttccctgccagcggagcttctccatggaggctgtgcctggagggcggtcacagatatggaggtgtgcgccaaacgctgcttcctcgtggatttcctccccactccgttctcacgctttgcaagctttatttctccggggcctgacccgtggggtttctctccagacctgctccttcccgtttccagaaaggcccgcaggggcttcctatggctctcttgcctgtccccatcccccttccctcgggacagtgacttgccggacgggtgggctacccacaggaggtttgtgattgcttagacgtctttgctgtatgaagctttgacctcaaggcatgatgcagatgggaactaaggcatgagtttctcctggccgctgtaacaactgtcaaaacggggtggcttatggcaacgggaacgtgtcctctcacagttctggaggccagaagtctgaaatcaaggtgtcagcagggccagcgtcctctgaaggctccaggggaaaacttttccctgcctcttccagcttccgatggccccaggtgttccttggcctgcggctgcatcactccagtctctgcctctgtcttcacaaggcctttttctgtgtctgtactttcttttctgtctcttagaaggacatagcattgaatttacggcccaccttaatccaggatgatcttattttgagatccttgcctaaattctttctgcagaaacccttaaacagaatcaggtcaaatttgaggttccaggtgggtagatctttgttttgggggattcatcattcagcccactataggtctgtttgtgcactgaagacgcgggcggtccctttggccagggctgcagtcggtcttgccttctcttgtgaccttggaagaatgcaccttgctggatgcataggcctttacagttcttttgttcttgccaaatttcagctcagtttcctctctgctgccgacgtgcatcctctctgcccagtgccccttctgggactgtgtgtctaggccccgaggccctaggaaagaggggtgggggcctcctcactaccctgtagcaatcaggcctcattaaaatcctggagcctcagactggacccagcccttagctatgatcaaaggacagcccgggatatgattaaagggctagagaaagatgatttaagctgagaaagagaaggccaaggagcaactggattgtcctcgaatttggaaaaggtaattatgacttgaagggtggtgcccagctgtttcccatctcctctgaggacagggaaaaaaaaggaaataaatgatgtacagttagagcagttggttagatatgagggtgaacttcctggctgggagtgtggccaagcctcgatttgggtttcctgacagagcttggggaacctctttacctggaggtttctaggcctggtcatgtggctctgagtgattaccttgaaggggcagcggctggggctggggctggagccggtgggctctgagcacagtcatgcaggcaccggcactttctggctgccctcctgccattgtcccttgggttcccattttggtgaggcgtgcaccctggcggggctccccagggaactaaatatgtttgctgcactgtgcgtggagacggagaatgtacaattggctgaccatgtgctaatctggtggaactccatgccagccctgggagagaacaattgcatgggtgtgtccacactcactaggtgctttttagaaaaacacgagagaataatgctgtggcttaggatggctgttgtgccggacctggcatcttcccagggggctgtgttgttggactgagtttcttaggtactggacccccaaatccccaaatgcggcgtggacagatgacccagtaggggctggactatccgataggcccaggtgctggagttcagacaagaaataccctggcctggcatggaagatacggggtgctattaatggcagcaatggctccatttctgaaacccgggctcccaggcagacgagggtgtgcacgcatctgaaatgtctgtggttttgcaattcccatgtccacaaactcacttggttgaaaatagttcaaaatatccaaagcatgagggagggagtgactgcttttcttaaaaaggaaggacttgatttcatctacttaaaaagccacccaaacctagaacattttccgcaagagaaccccccccctcgcgccccacctctccagaatggctggggagtctcagcactcctgcacatttgggatatttcagagtgggtggggaggtgcaaacgcgcagcgagcgaccctagacccaggatgagctctcaggcactccgaggccacacactcaagggactggagcgcagttgtagcgtttgcgcctgctgctgcggggtggtggtggtggtctgtgctgtgaattctcacatggcccctgactctgggcagaggccgagggtctaaggtacggggtggcaggaagagcatgcagaagagggtttctggctttccaaggcgagtggaagaagcgcctctctctgttgtaggtgacacacctggagggcccttcttgaggatgagagcctgttgcttctcaagttctgtgtctaacccaggtccccaggtctaccccagccactcggccctgcctgccttgtgggtaatacagtttaatggtagagacgctggcctggagggaaggctaggcttcaggttagggcccagacgggagggagaagcccccggggcagctccctttctgctcactcactgcctagctccttccttcacaccttcggaaacctctgctcctgactaggtctacttcctgctctcaggaggcccttattgtggagggaggcggcgcctgtccctggcttctctgacagccgtgttccatccccgccctgtgccccttctcccggacagtgccttctccagggcccacccacgagggtgcagcagtggcccccggggtggtggtcgtggtgggggtgttagctgcaggggtgccctcggtgggtgcgagttggtggcctctcgctggtgccatgggactcgcgtgttcgccctgagcccctgggctcttgagcccacaggctgggatcctgcctgccagccgcgtgcgccgccgcttaacccttgcaggcgcagcggcggcggcggcggtgacagcgaactttgtttggctgcccaaatacagcctcctgcagaaggaccctgcgcccggggaaggggaggaatctcttcccctctgggcgcccgcccccctcgccacagcccggcctccacatccgcccacatctggccacagcggggcgcctggggggaggggccgaggccccgtctctcgcccgtcccctgggcgcgggccaggcggggagaaggggggcgctccggtcgtgtgcccaggactgtcccccagcggctgctcgggccccagtcccccaggcccggccttgacaggcgggcggagcagccagtgcgagactgggaggccggcgcgggtgcgggaacctgatccgcccgggaggcgggggcggggcgggggcgcagagcgcggggaggggccggcgcccgccttcctcccccattcattcagccgagcctgggggccaaggggctcctccggcagcgagctctgcactgcaggagcgcgggcgcggcgccccagccagcgcgcagggcccgggccccgctgggggcgcttcctcgcagctgccctccgcgcgacccgttgcccaccagccaccatgtcggaccctgcagtcaacgcgcagctggacgggatcatttcggacttcgaaggtgggtgctgggctggctgctgcggccgcgagagtgctggagaggaccctacgggtgggcctggcgcgggacggaggtgcgccgagggcaggagcgacccccaatccaggcgccctcctgtcgagagcgccgctcgcccctggccctgtacccgcgtcgcctacgtgggggaccctgttgggggacccgcggggaccccgcgcgccctcacaggaccctgcgctcgttctgcgcactgccgcctgggtttccttccttttattgttgtttgtgtttgccgagcgacagcaacctcctcgagggctcgcggggctgcctcagaactctctagggcgcacagtttcactctgggaaatccatcggccccctcccttcgactctccccggcggctctcgggccccgcttggacccggcaacaggatagggaggtcgttcctcacctccgaccgagtggacagccgcgtcctgctcgggcggacagccctcccctcccccacgccgccagttttggggccgccaatttgtgcagcccgtgggccgggagcaccgaacggacacagtccaggccatggcaggtccagagtgggatgtcccatggcccatttccaggcctgggggacatcctcatccgcctcccagaatcgggctgtggggggcagaaggggcctgcgtgcgggcagagagcgcattttggctctctcctgtcttcggggtttacaaagtatgttgggacttgcggggctgctccgtccaagcccgggtctggcgtccacgtccctgagcctgtgagtgcgtgcgctttcctgcgtcctcgtgactcccggtgctggggctctgcgtcctgcgtccgcgggagtaaatacggcaggcagaggggaagctcacacaatggtctccagcgctctggggcagggcttctgaggggcgggcctgcctttgccaggacctggagcccccgcccctctgaggggctcctacgccgacttgggcagagccctctggtgggccgggaggggagaaagtctgttgaaatgagcaactgtccaggtgtcaggccaagctgggacgtgaccagcctgaggtcctcaccgctccatggccagaaccagggctggcatctgggtgtcctgagcccagctgcccacacggcccacctggggtcagccccatctgggtgggggaggcggggcctcctgggggaccagaaccttggctggatgccaagcagagtgccagtggctgttcttcagggctgggcctgaggagggtgtggggcggcgaaggacgggagggggttgtgatccagtggccgcttgcgctgtgcagagtgtgagctggagacatcataccgactttgtcagcttagtggtggaagcactttttctggctctagccctttgcaaccatgcttcccagagggaggggaggtctgggtccgcagagctgggagggtttgctgttcccgcctcccctccaccgccacaccccctcatctggacatctttgggcacatgctcataccggggggtctctctaggtccactgtgttccgttgagcctcctgcaggccccgagtgaatgtggcctccctgcccctgcctctttgcaactcttccctgcaatcgctcctccaggggcctcccttgtcccaaatgtccaagtggcacgacttagccggtctgaccactttccagtgagcccttatggagagagggcctgtgttctgcgggcctctcctcctgcccgcgggatcgaggtccctgctctcagttcctaaccggaagtgctgggtctctggtgggatttctggggaagaactctcggggctcaatgggagccctgtggcgggaggggaggccagggtttggggttgtgttggttgtacagctgtcaccatttgtaccacgaaagttgttagtgcccctgcctccagtctctgggtataactccaccctcgcccccatgcacctccatctggagctgcttctgcggctgcctcccaagccagttttgtgaccctgtaatttagtccgagacaatgggctcattgagaccatcctggtgcagcagttgacaatcctttggctctgggggaaggtttctcagtctctgggggtggggccttgatctgctggttccctgtgtgtgtcagtctcccccttgtgtaccctgaatggttttgctgggaattctggtcttagagccatcaggtggcccaagtggatgggtgtgagagagtgtgtgtgtgtgcatgagtgtgcgtgtgcttgggggctgacctggggtatggaaagttgaccctccctggtgcccaaggaacctggagtatagttggggggtgggggtgtgtatacaggagatggacaaccttgggtggacagatggacatggggaaggtatgattggaggaggtggaggagagagtatgattcagcccagccagggggtgatacaaacaggcagcttccaaatcagggtggagaaaggtcgccactagctagcaggggagaagtcagtatggaggaggcggaccttgagggagagtaggaattgggtttcgagaggaaggagagccttctggccagcagcagctggcagcagtgggggaggccggaatgagctggctggagagggggctggggcataaggaggggcctgcctgtgaagatcagatgggccaggctgcggagggccaggcatgcccgatgggagtgcagctggtccacggaagcatctggagtagccgggaatgggcgcaggagccgtgcatcgggagcacaggtctctttcccggggcggctcacctggtgtcttggttcctgcaaggtaggctgaaagtgtggggaggaaactgccagctcctcgcagcactgggatggtggccccacggttcctgaggccaacggatgtgggtacctgtcaccatgtgggttgctgaggggtggagactccaggggccacccccaaagcaggacgagctctgagccatggcatctctgggagcagttttccaattgagcagacgtctaggcctggaatcctgtaggaggtttagaactagtggcagtatgcagggtagagggcaagtgacctggcatggggaaaggggtaggtgcccaggctggcacagcacacccccaaggagcaggtagacgggaagccgtccgtgggcctgtgtgtgtgctgggagttaaaattctgcccatgtcctatgtcctgggcacatctagcccctccctggggagcacctttctcttcaccttttccttccctgcctgtcccctttgcccagggccttccccatccctcccgtcttggggacagagggcaccatggcgttatgctccctcgcccatgagttgcacggggattcagtccttctgctgtcctagcggcgtccgtcaggctcagcgttcccaggaatggagagggtgtcagtgtcttccatggactcaaacttcccgcatcccgcctttgctcccgcttcaggacaggtctccgggcttcgaggtcttagggctctgtgaaggcccctatgtagcagcaaggagaatgttttgtattttgccgatgagatttttagagtcttattttccacttttccactgtacaaatgggcccccagacgactgcagcacccgccactgcccgtaatagggtgacaagagggatgaccctttcctctttctcccttctggttggtggaggcgcggggcgggcggaccgcatgcactttcgtgaattcaggccaagtctgttatcgcaaacacgattacaacttgggtctttgtgtaacaaaagcctttccaagtgccagctgttggcctgcattgctcagcggtgtttgctgtaaccagatttgcacactgagaaaaaatccaaaagtccttgatgtttgttgaaacaatctggcccaggacccacgtgctgagatcccagagctgtgtggcatccgagcttctcccgagcccccactgtcgcccagggaggacccccagagctgtgtcctggaggcagagcaggctgtgggacgggcttctgggtgggaagggccatgtggacgtgccttcttgcttgagagtcccgacacctccgggacgtgggagctggccctggctggattcaggtgcctctttcctccctagagaaaggccccgttgcttggtaataggtgcagacctgtccctaattaatgcctgtaggcctcttgcgtgatgaatcctgcctttcagccaagactcaaggcctcctgtgaatactgcctccctgcagtttgagcttttgtggtgggaggcaggagccacggggagcgggggcaggcctcttgtacaggtcccacaacccctggcagcgctgatttgatgctctttgagttcagagccagggccagacagacctgctgtcctgactgcaagctggttcatttagaggggggcggacacagcaccaggcagcagatgcgccgtgatcagccttgcagctgggctgtgggttacctgggctggatgtccgggaagaggcagatggaggtaaacgccgggaccctgcagtgactgggtgaccgcaggctggaatcgatttctgcaggctgtggctgtccaggaaggttttgaatggggctagtggacagagtttgcatccagaggggcagtgctttggaggagtgaggggcgcggaagtgtagggatgcccaggctgccctccctctgccatgggaaagctaggcggcttagatttcttcagtgtctttgcccgcttccctgcctgcacagtggggttagaaacagctgtcttcgagggttgccgggggactcagtgagatgcagcccgtggtgctgagcacagggccggccacctaggggtgtggtgggtgtcgctgctggtgtcgcatctgggtgggaaaagggggcatttgcaaaagacagtagatttggatgcttaaacatacaggtctggggatgggaggtctcaggcaagagcctgtgtgatgccactgtgtgaatgaggctggacagcgcggtcaccactaattatggaaagcacggcagacaccagtgcctgtagggcccgcctgggggtcgctctgagcccaacagatacccaggctcccggtgcagccatgggacccctcttttcctgcctggctgacactctggaggctggagtcatgttggctgcaggttcctcttactgggaggttgtcctggtcttccctgtcaccctctacccccacccccaccccggagtgtcacagatgggtggaccatatgcccatctgcagggccaagcgctgacagtgaggtgagcacttgctggaggacagcaggggtgctggcagcctgcttttggctctgcaggctggcctttccctgaaaagcggttgtggcagggtgtgtgtcgcagggagtggtgtccactgctctggacattctctcccagcaggcctctgcaagggcccaggtgagtgtggtgcagagctgggcaggcagctggaacagtctcatcttgtccagtggtaagaccaagggctgacgggccaaggctgcctgctgctcgcccagcctgtggacccatccactgagcacccctacacccccacactgggcccggggtgtcagcaggtggaggggggactgggtgcctggaaaaacaaacttaccagagcctgagtccccaggggtcagtatcaggcagtcaccacagtgcctggtacatagtggccacctggtctcgttggctgtcttggtggtggagagtgtacttggtggccacacacgacgggcatcacccagggaaatgcagatatgcagattgtgcacttgtctgtaggagtcacagggacttctcagcctggcgacgtgtggcctctgcctgcctgttgggagagaggtagctgtcccctgatatcctggtgccaggagagcagagctagggtctcctcctcctttctttgttctctgatatcctggtgccaggagagcagaactagggtctcctcctcttttctccacctcctatttcttgcatgcccaggcatcaggggaggtcacattcggggatgaggcttagccacccggttcagggcctcactattgccatctcttccctttgccagccagccaaatgcccctccctcaccgtgctggggatggggctggcctgttcctctgaagtctccttggtgtatagcctaggctggagccccaggcagttccgccaccctctcctccccctgccttttttttttttgattcgtcccagaaacccagccaaaaaccaagttcctgtgctctcccttgacaaagccactgaggaaaaatggtcaaacactggctttctttccaaagccctcttggtttttcccaaatttggaggctctgagttgcttatgagaccaaagggtccggaactctctggaacacagtcacagaagtgggaggatttgtcatcttgccagccaaacagacccaccagttggcccctagacacccccaggcgcctgggggcatttctgggctcaggctgtttaatttggtctgcagagccccaaggctccgtttagactggcccagcagacgttctagagacttcaagtttgttgtcatttttaaaagtcctgccaatgcccagaaacttagacagagggacaagaagatgacctcgatgtcagctgggagcataaacagcaagaccccccacccccatgcctgcccccatgcccacccccatgcccgcccccactgctcctgtagctaggtctccagggattgcctgtggccgtgggggaggctgggaatgcggggctcagactctacttggcttcttgtatttttttgtttttcgttgtccatcttctttctctgaaatttctgaatctccccctacaggctttggcattccgtctcccctggcatctctgggccaactggggaaaccatcattcgtccaatatctggaaaatcaaggggcctggccttaaacacattgcagtgccctcctccccacatggcatcgaatttcctgtgtcctcaaagccaggagcccgtgccttagatgtgggcgatgaagccttgcagacacttggagtggctttcctgggagtctccttggccttcccatccacctgcttcccctcccctgccccaaactctggccacggcctcggaggggtcttctgagtgtaggttagcctctgggtgtaaagttggggggcagttaccgcacatccccctgtcttcacggggtgctcccaggggctcaggtcttgggtgatggtggaagggtggggtggggagtagggcattatctcgtgccacctaggtattatgtagactctggatgggcagttcccaggagctggcttttccttctcaccccctccacagcactgcccctctgaggggctggagctctctggagccctttgcagcctgtggcaggtcttttctgattctgtgcctggtttcgcagcctccaacccatagccagtggcatgaagggcgttcctggctggctctacctgtggaccttgtaggcagcagttccctggggcagggcctggggacctagcacctccttgtgggaccccttgggcatgagggagggagccacctgggccccagacagacccccttcctgtctccaggaggttcaggatggacctgtctcatctttctttttggtgggaagagagcagtcccgggcatggggagtgtggcctggacagagccacctagcctctcccctcccccaggcagggccctggaagatggagatggttctgctcctgctatgtcagcagccagcagtctggtggatttccatgcagtccaggcaggatctccttctgtccccaccccccaccccatgtgcaggaagctggttccaagcagggacccttggccctgctttccacgtgggtgggcagtttccctgcgaggggcaggccaggcccctgccctatgtcccccagagaccgatgttatctacactaagagcatacaagtctttctggctccaaaccaggcctggaggggcggccttctcctctgtcctctgcctcttgcctcctgttaaaggtcagggaatggagtgctctgtacgtttgctggggttgggttttttcctttggtttaaaatgaagggctggaatccctggtgcggactgcacggtgaggggtattccttggtgtccacttgccgagtgttactgctgaatgccctgccaggccaggagcgtcgttgggggtgggagaagcagttggcttatttgtttagccgtccatgggtaccccaagggccagctctgtttcaggcactgggggtctaggcatgggctcaggagaaggggtagaacaggagggcttcctggaggaaggcttcctagccagagactggggtaggaatttgccaggcagatttccaggcaggtgatgctggccaacttctcttgccatttttttcttttcttttcttttctttttttctttttttgagacagagtttcgctcttgttgcccaggctgcagtgcagtggcacgatctcagctcactgcattctcagcctcctgggttcacgcaattctcctgcctcagcctgtgagtagctgggactccaggcacccaccaccacacccagctaagtttttgtatttttagtagagacagggtttcatcctgttggccaggctggtctcgaactcctgacctcaggtggtctgcccaccttggcttctgaaagtgctgggattacaggtgtgagccactgcacctggccttctcttgccatttctgcagactcatagtttgtgtggaagactctgtctgcctggcacagctgccctcagcactcaggtgggaggtaggggaaagggctgttggtgccagcacaggtcatggcatgagacaggctcttccagccaagcggggtgcactgcaacattggaggggccctgctgtgcacaagatccagactctgcatccgtcctcctccccaggaggcctggagggctgggagggacctgggctgtgaaataacccgggtgggagagaggcactgttggaagggcagagggggctgcaggtttgtagcagcgagctttaaaccctgggcctccaccagaaaacctcagaaagggatgctttgctttttttctagactacaaaagaaacccttggccgcctgagccccttgggggcgggtgggggaggagatccttcattcgcacctttgcaggcccagtgctgtgcagaggaaggagggtggaagcaaaggcggggtccctccctagcgcccctgccctgtctggttgctgctcccagccccctgctcctggcccggaaacatggaatcttgggacagctggggtagggggcacagaacggagaccctggtgagggaggaactcttcctccagccctggctgtggccagagcacggccaggctgggaggacctcactcaaatatttacatctctcccaatatttaaatgatgaagcaggctcctgcacacagctgccctggagccagctgtcgcctgccctaccctccctctctccctccctccttctctccctccctccttttctccctccctccttccctccttcttgcattctttgtctctgacccaagtccaggcccttccagctgttccctcgttacccacaggcacctcctctgagcttcttcttgttatttttcataaccatttcctttaattgagcacctcctaggtgccaggccctgggctggtactttgtatacaaggtctcttttaatccccccgagagcccaacaaggtagattgggctgccgaggctccagcactggaaggccggcccgggtcctcccagtgcacactgcatccttccatcactccccactgcagagacctgttccctggcccctggctgagcccagtggaaatctctgtctactagtccttggagagtggggatggctgggggttccgaccctggggtttgacgggggctgcctttgccccacttcagcctggctgctcttccactcagtgtccgtgtttgcaaaaccagaacaacagtgttacctggcaggctggctgggaggcgtgggagagggtgcacggaggggctgagtgaggtgtcagcatcgtggggatctccaagggtagctttcccaggcccagggtggagtgtgaaggaagagagcgcgatggtccagcgtgctggttcacgtctggccttgcccttgcccacatggcaatgtaggggagtcatcagcctctcagtgcctcggtttcccatctgtgaaatggggacaagagtaaatcactgacttcaggtatggtaagcactcatacacattgactattgcaggatgaacacagtgaacccttcttaggcttctactacatgccaggcagggtgccaggccctagtggagaggggacaatgatgggcaaactagctcctgcccttgagggctgtcgagccgggaagaaggcgccggctgccctggctgtgacccggagcggggtgattggcaaagaggctggcggggggctgctccctctcctgcctgtgttccatggcagggtgttaaactggcttttatcatggatttccaaggccctgactgtgggacctcaggcaggttttaggaccttgtgaccttgttcccgctcgtcattcaggcctttgtcctcagcagtgcccagcacacagctacttctgcatgtccttcagtgtgtgactgaccctagagctgagacttggcggctgaggctggacattgtccttagataactcccggggaggtgggggcagggtggggctataagctggcaactccaagtccccagcagcctccaaatggaggctttcctcttgtaggattctcagggggagggaggaggggatgggggagatgaggcttgtgggtcttcaggaggacagaggttcacacctgcagctccccagaaacacttcggggtgcccaggctcacccagccttcctgaaccagaaccaccaagagttggggaccagcagagtccattgtttagcaagatccagaaatgattctcctgaacagtccgagccgagagtgacatatctggaatcagaacattaggactacagaggaatcgagagaacgggcccaacatgtgtagggacctcagccacatagcggcacagggagaagagcacccaacattgtcactgtatgaacctgttttacacacacacacacacacacacacacacacacacacacacacacactccccagtaaagagtggaaagacatttgtcagaatattgatggaggttacctgggttgtgggtttatagatttttccctttgtttttctgcattttgcaaattttcagctttgtgcctaaattccttttacagtcaggataaaagcagtagatgttatttttaaaagttcatggtggctcgtgcccataatcccaacactctgggaggctgaggcaggaggattccttaagcccaggagtttgagaccagcctgggcaatatagggagacccccgcgcccccccccacctttttttttttgacagagtttcactgtgtcccaggctgaagtgcagtggcttgttcttggttccctacaacctcctcctcccaggttcaagtgattctcatgcctcagcctcctgagtagctcgattagacacttgtatttgtaggatttgggaatcctacaagaggaaagcctccatttggaggctgctggggacttggagttgccagcccacggattttttagtagagacagggtttcaccatgttgccaggctggtctcaaactcctggcctcgagtgatccatccatctcagcctcccaaagtgccaagattataggcgtgagccaccacacccggccacaggagaccccctcttaaaacaaaaataaaaataaaaataaataaaagttctctgtcaaaaagaaaaacacatcacccaatctaatctccccctgggattgggagatgaggaagcagaggccggaaagtgtcacgttccctggtcgctggcagtcagggcacccgaggcccgggctggttctctcctgctccaggcctggggtgtcaggtggggcctctgctttgcacaaaggtccaggtgcctctgccagcactgcctgcttctgcatttttggccacaaggaatgtgggccaaaggcaggatgcttgacctctgcccaggagggtgaagcgggctggtcctcctagttcctgctccgaggcccctgcggctgtgcctttggaaattgctggcctgagctagtgtgaggagctgggacagacctcatcgtggccctcgtggggtcattccatgtccgggctggaaaggatctttcggtccagcccttcctgttcctcaccaggaaactgagaccagagaggtcatctgcctggcccggggtggggtgtagatggcccttgtgactcctgcatgccacgtccagacagtccctcaactgtgggcttcccatacaagctggggacaacttagccgaaacctgcgatataatcaagagaagaatgactcctcctgcagccctgtgccccacaggctcttcctcctgaccccacccctcctgcagaggggcctcatgctggtgggtgggtccctgttgctgcaatgggcccgagcagtttctgggcagtggaggcttggctgtcttcctgtccaatgtctcctgtagcccacgctgtccgggaagggctgggaaacgctcagccactggggacttcacaagatgggtatccgggagatgctgattggcaggtctggctcccgtggcccgcaggcaggtcataggtcacagtgctgagctgggctgagttggcagctcagggcagtgggggtgggggcaccttgctcagccgtgggcctctctggcaccagggtttggagctattactgtaacaactccttcagtttttccttctctcataggccaccagcagaattgaggggccctctgttgatgaggtgtggcctgggagggggtagttgtctgtccagctgatcctcgcggacaggtgaccacaggctccctgccccggggggttgggggaaagatccgggaggcctctctggcttccctacttggaaggaaagtacgggcaaaggggagacactttacggggacacatttcagccagttaacctctggccatgctgggggcacagtgcctgccctgcccaccaaaggggtcagttctctccaggattttagcttcagccttcagtgcagggcagatgagcactcggaggcccagagcactcatatcatgagagagaagaataaattgcccaccacctggaagctgtgactgcacgggcactgaagaaggttaaacagaagagcgagacacacctgaaagtgtgacctgaaagtcctggggtcggtgtggttagcccagatagctggggagcttcgggtaccaggctttggaggggaggaagacccccgtgacagtttgctggggccgctggaacaaagccgcacgaactttgggggcttaaaatggttctggagaccggaagtccaaaatcaaggtgtcggccaggctgatcctttgggggctctgagggaggctccggcccaggcctgtctcccagcttctggtggctcccgggcgcctctaggcatgtagatgcatcatgccactccctgctgtgtcttcatgtggcgttttctgtgtctctgtgtcttgtgaggacgcttgtcattgcatttcaagcccaccctaaatccaggatactctcatcttgagatcctttattgcatctgcagagaccctgttccagctcctgtcacattcacaggtctgagggctagggctctggcatgtcttctgggggtcactattcagtccactgcagcagctgatcttaggcgaagcagaatgttctaggcttggggtgagtggagggagcaggcggagcaggagaccaggttcgaagagaccgcggatctcttctgtctgatgagggcatgataaggttcttatctcaggccctctgaatggcggccgcctctgaggagaccctttcccctggacctgcccctccagaaacctccgcttaggtccaggtcccacggtggatggtaagaggcggctctctctgccactcttgatgggtgagtgtgtgaacagggctgggagcgggacacttgtcatttctgtggacagattccagaggctcctgcatttgctgctggggagggtgcctgatctagcctgaccccccgagcccccacctcccccttcccacccccnnnnnnnnnnnnnnnnnnnnnnnnnnnnnnnnnnnnnnnnnnnnnnnnnnnnnnnnnnnnnnnnnnnnnnnnnnnnnnnnnnnnnnnnnnnnnnnnnnnnnnnnnnnnnnnnnnnnnnnnnnnnnnnnnnnnnnnnnnnnnnnnnnnnnnnnnnnnnnnnnnnnnnnnnnnnnnnnnnnnnnnnnnnnnnnnnnnnnnnnnnnnnnnnnnnnnnnnnnnnnnnnnnnnnnnnnnnnnnnnnnnnnnnnnnnnnnnnnnnnnnnnnnnnnnnnnnnnnnnnnnnnnnnnnnnnnnnnnnnnnnnnnnnnnnnnnnnnnnnnnnnnnnnnnnnnnnnnnnnnnnnnnnnnnnnnnnnnnnnnnnnnnnnnnnnnnnnnnnnnnnnnnnnnnnnnnnnnnnncccacctcccccttcccaccccccttcaccaaccctattcccagagcttcacttctccaaaggcaggtgccgttccctggacttctcagcagctaccccctaccccagacccctctcttgttggcccctctggtctcagtgcccgctcctccctgggctaccggcccctcctccgtcgcgagtcttctgggctgaagtgtggggccccccggctgtgtctggctctcggggtataccaggggtccccccaggggcccgccctgcccgctaggtttccagggagcttttcaagttcttagttgggcttgattgagtttcccaggtgcgttgtctcagagcaggaggggccccggccgagtccgagagtcccctcagtcacaccctgggctgtttggagcagccggcagcccgtcttctggtggccctgcctctctgtggttaccccttgtggaatcttctgcgtccagttgcggcctctcctacacagcagacccaccaccccctcttatctgtgattcttctttgtcaacctcttcatgtctttgaggatggagaccaggtctccctcaccctggagttcagcagaacctaaaccgggcggatccatgggggctctgtgaccactgtggctctgccctcacctccagccccacttggtgtgctttgggtcatgtcattcagtgctggtcccccacacctctcccctggctctgcaggcctgggaagcagctggctcctgggtgcagctatgaacagagcctgaactctgctccctggggtcaccatcccctgtaattaggctgcagctcatattggctagggcagaggccatctgctgcccgccttggggccacaacacagagagccccgtgattaatggaggctccacctgggccaagtggcccctggtgttaggctttttcttttttctttttctttttttttcccattttttaagtgcttgtaacatttcccctcatcgacaatgagatgaggagggagggaggggtggcttatctgcccaggcagatcaggaatggtcaccacctgtgtgtgcagtgacaggtctgggaacagacaagggagagcttgtccgggaggctggaccctcacaccgatgctgcctgtgcctggcagctcagtcccgggcttcggaacagacactgaccaacgggctcctcagggtctccaggcccgggtcctggtccccggcagagcttcccgtccgtggaaaggatcacaggacagccttgctggctccttgtggggagctgggatgtgtttctaagagcagcatgcgtgaagcccggggtttgggcaaaggagtgtttggggaagtgtctgctgttgttggagggtggggagtagaggggaaggaggggcaagcggtgggctgaggaggtggctggccaccctttggtggggacgaggggctatggacagacctggagccagcatcacgtgtctctgtctccagagtcgaggacggagagctgccagagaggccctggcggggtgtctgggggcacctaaaggacgtgggtggattaaagctgaggaaagcctcattttgggggactccgtacttaacctttgaggccctcagagctgcagcctgtggtttttcgaagtcagtcacttcccagggcctccctcctgccttcagcgactgccatttatctgggagtctttgacccaaggagacctgaaaggtcatctggtccctctcctacccccaggcaggccacacctagaccctcccacacagatccgtcctcacacttctgctgccttccacgagggagggagggagggtgggcggccctctcacccaggccctggtggccccaccccagccaggaaattcttcctctttatctgcctcacatctcttcccctgcggcttccgcccatttcccctcaatctgctcctagtggagcagccagcagctggtttaaaacccgggggtggggggtggggggagcgctagaccagtgcatcacgtccgagtgtgtgccagatgcgctcccattcccataactgatttagtaaagaaaaaaggaagtccagcaacttagcgcgactttaaagtctgcctggaatgaccctgtggctgccggaaccaggggcacacggtagatggggggagcaggcacagagaggccttcgtcccagatcagtcgctgtggccctcttggaggctaggctgtctttcaagaacaggacccaaggccctgcgagtggtggcctcctctggagcctttactgtggtcctggttctgctctgcataaagagagatggcttgaagcagaagctgctatgtggctgtcccaggtgcctggcacagctacgaggtggctccctgactctgggtgtggttactccaagacccttctctggtggggcacaattctggccccaggtagggcgaccgtagcggacacttgggagtgaaagggacccttgaatgactacggtgggacaacagatgtgagctgggattgtcccgggaaggctggatgtatgggccccttgggccagaggagacacagcagaaagctctgtggccgatgggacccagcaggagaagggccggccgaggctggggcaacgcgcttgcctgctgtgaagggcctgtgtgagctgatggctgacggtggggcgaggctgcctcctgccaggctagaccagctccaggccacccatatcccctttccagaaccagtgaatccgtggctagaaggggcttcagaattgacaggacactcagggagtcgaacggaatggcgggagtggccgcagcaggctcaaggcctcctccgctttgttttctgtgttctgttcctggcgtctatatcctggggttgctgtgacagatgccacaacctgggagcttacaaacatagcttccggcggctcctggagattcccggcgtttcttggcctgcagacgtatcaccaccatctctgatctctggcccccgtctccacgtgactttctccccctgcctgtgtgtctttctccttttctgtcttttatgaaggtgctcaccattggatttagggcccactgaattcagaatgatctcaccttgagatccttaccttaattacatctgcaaagatccgatttccaaatgagatcatgttcgcaggttccaggagttaggacttcagacatatcgttttgggggacactgttgaaaccactacgtttagtaaactcagagttggtgccagtgtcccctgcggacaccatagcagattctggaagctacttgtaaaggaatccgtaggacttcttttcctttctggctgtgtagctgggctcgggaaagctgctggttcaagctggggctggttcagctggtgctggcttgccaggttgctcgagagctttatccagggagaaattaacatcacaaaattgggggataagagaaggtttggaatcccaagggctgactgttgaggtcggctgcccacccctttgtgttccatcttagggggacccagggctgccagggctccgttttgggaaggaatactgtgggccgctgtgccccataggcagggtggagggtccccttgcagccagcaagctgctcttcctgtagcgtgcagagggaaggaggaggcttgtttatttctcttggcctcagccgaaaatccaaccacaggctctggcacgaggcagacctgctcattctcacatcatcattgcggagtgagccaggcctcctgggtggggctatgatgagcaggaaggacccccggagtgcctgggacttctcgggcccagggttgccagaggcagagagaaagaagcctcctcctaacccttgagcaaagatagtcatcagaatccgtcagacggggcagggtgacctcatggtcaccctgagtggcctcctgtggctcttccctgggtgccgatccccctggtgcatttgaagtttgcagggatgctgttgacgcttcctgcacctccatccagggcttggtggaaatggttcttttcctccttgtccagaggcaccggtcaggcccttggtaagattgcaatcttacagggtgttgaaatgtaggcctgcatccaactggagagtcagggagcaggggctgtgtggatgatgcccccaagtcccagacctcagtcgacaggccacgtgtgcagataagcctgggcagtcagtaacccttggccaccaagctggcctcctgcagactgggccggccctggaggcgggtcttagctgctagcccgtggcccagccaggcctggccttgggaaggcagaggggaaggggactgggaaagggaccgagctggaggtggcggcaccccagttcttctctcctagaccctcggcaggtttgaactatctgggtgcggctctctgaggagggagcgcctccgccttgatgtggactctaccttctgttcacattgtccctgtccctaaacaaatgtggctctctgtggggaaccggggggccgccctccccgacactgctgtttcctggcttccctttgcaggctctgctcagcttcactgcacctatttttaagcccttccttttggaccgttttgcttcctgagaacactcccctccccatcaccccaactgtgtcctcctccctgtccggagcctgctccacctgccccaggagccacctccctcctccaccaagcagcccaggccaggggtggggctaatttgtgtccctccagaagcaggtcctgagacagggatttcagtgggaggggacaccaggggatccccgagtgtgggaatgggtcaggcagggaatccagccaataaagggtgcctcatcagctcattgtgaccacaggtggctgcccagcccccataccgcacagcagagggagactgcagaccgtgcccccagccttggcccacctggggttggggaagggagctggggtttttatacttcagttcttggccaaggactgcactgttcactccttccagccttctgagggcataggcactaggaagggctctgggcggagacacagaaataggccatgtgaagtcagtgggtgtgattggtggcaggccaggacagcctcggccaccagcaaggtgaccacacatgtcaacatgcacaacccccacacccaggagatggtaattacaccagcaacagtcattcttgccgcgtgccgtgcctgcacccaggacatcttaattaattaattaatttatttatttgagacagtttcgctcttgttgccccagatagagggcaatggcgcgatctcgggtcaccacagcctccgcctcccgggttcaagcgattctcctgcctcagcctcccgagtagctgggattacaggcatgcaccaccacgcctggctatttttgtgtttttagtagagatggggtttctccacgttggtcaggctggtctcgagctcctgacctcaggtgatccgcccacctcggcctcccaaagtgttagaattacaggcaagagccaccgcgcccggcctcaggggcaccttattaccctgtcacctcctacaggaggtgacactgaggaccctgaggctcagggtagactgtggttatgtcactctcctgtttgggtctcctgctctgagccctgaaataaagagcacagtccctgtgcaggtccatacatcctgtctccagccctggggtggtccttaagctcctcgaaggcacaccaggcctttggccctcatcccccaagtcctggataaataggaggcaaaggagccttcacaactggaccccgctctgccagcgccaaggccctgcccgactacccaccccaccctgcacacatcagggacctgtgccaaggtccagcatcacaggagagtgaagacaaggagcatgcccacggcgtacatgctgctggattcgctctgtagatcttaagcgttatggggcgttacctgccaggggaggttttcctgtgtctttcctgcaggctcagggtagcgtacagggcggtgcctccctgctccctggcactatctgtctgggttccctcagccctgaccctgcttcccaggtagccagtgtttcttcagggacggaacctgctgctgctcagaggagacccagtttgaccagggctagcattcctggaacctgagctcagaattctaccctgccctgggcagaggccacattgctccctcctatgagagcttagctgcacatgagtttgttctgaccttaggctctggcatttctttgcatgacatttgtcccaggctggagcagggccctgtggctcgcttggtatcccctccccagactgagtcctgatatgtgcaccaggaagtgcttgatctggtttcgggagctgggagcggtttgccaggcagcctgcggtcagagcacgggccttaacaatggtcccttgtgcggcacattcctctctaaacaggcccagatccaggctgctcctgcttcgacccccgcatgggcctggaggggaaagtttgcatctggaggatggcccactgtggcctctttttgtgtcgcagctgagaccataggtgcttgaggataggagaagccctatgcccttcatgggccgtgagatgtgtttccagaggtggggatggggatgggccagcgtgcagttatccacaccctccagtttgttggcaccaaagtctgtgtgtgtgtgtgtgtgtgtgtgttttttttttaattttgtttttccaagatggagtcttgccatgttgtccgggctggtcttgaactcctggctcaagcgatcctcctgcctcgggttcccaaagtgctgggattacaggtgtgagccaccgtgcccagccagtaccaaggtgtgtttttaaagaacaatatcgatggttttattccctgaaaatgctaagtgatccccatgtagtagaagcatctcagaaggcaggaaattgtaatgaacaacacccaccaccattcattccgtccagagattgttattttctgcgcgggtgcgagtgcgtgtgtgcgtgcaaactgcacatgtgtgtatgaaatggaattaggatcttcatatacatcttgtatcctgctatttttacttaatattctcagcatttctcatcttcaaaaatgtgattttgatgacggtgcaggcctttgacatatgggtttagaaaatctgcggaaacccggattgtttccagggtttgtgagtttaatgctgatgcaagtgtcctcgtacataaatctttctgtacttctgattatttccttgggataaattcccagaagcgggcccaagcacacgaatggtcttcaggcttttggagcaaattgagatcagtggggagtggagaagggaccaagggaggcttttgggagcctgtgaggttggagtctgcctttaggggacttgaattcacagatgaaggagacggctggcaaaggtgggaacctcctgccctgtggtgggggtgacactgttttaccttccagtggcagcatggggaccctcccaacgtgacctggccccgcatctttctgacactgtgcacggtccacagttgtgatgctcagcagggagcctcttctgtgtccttcggttgcattaactccttgcggacagagaaggaagccgtccggtgcgcctgcctaccacatgggtcctttgaatgtgcccagtcgggcctgcggatctgtgcagtcacataggggtctaaaatctgcaaaatgacaagctcacgaacactcttgcttctgtaggttaatggggataccccttgactgcctctccctccatagggaagatggagacaagtaaagtgacaaggacctgccccagggtgggttatgccggtttccccgtgagggtggtggcaaggggcttcccaggaggtctgcacgttgggaagagaggggcgactgtgtgtgagtgcaggacccagggcgtagttttaggactctgatgggggaggagattctgggggaccctgttctgccagcctggtgacaggcatctcctaatgtttcccggctgggtacaactcacagcgtcctccgtggggaggcgtttgcccatgaggcatccctggcagggatggtcttgtttcattgccaaatatcccagcaatgaaacaagaatctagagtgatgtgattcctccgatgacttctccaaccatctggggtttttgtgcaactccaagaagggggaaggaggcagctctcactcctctgggctcctgatacggcagctctggagtggccacgtgtccgttggcccacagtgggccgtttgtcgagtgtgtttgtggtggagttggggctgggctggagagtgagtgaccacaccagcgatactgaccctaggccactgtgcagcccaggggtttcatcttcccaagggtctcgttgtgagtgtcctggtgctgctggaacatattgctggaaaccaagtggcccaacaacaaagattgattcgttcgtggttctggaggccagaagtttgaaatcaaggtattggcaggaccacactccctccgacagcttgaggggaggacccctccttgcctcctccagcttctgttggcccaggcactccttggctccgacagcatctctgcagtgtctgctctgtcatcacctagccctctccgccgtgtctctttgtgtcccgagtccccctctgcctttctcctataaggacaccgagcactggatttagagcccatccaaaatccaggatagtctcatcccgggatccctagtcacatctgcaaagaccttttttccaaataaggtcacattcgtgggttcttggggttaggtcttggacatgtctttttgggggtcactagtcaaccctttacaaaacctcagatgaaagtgaatcttcgcaggctgaaatgggggtgaaggtctagtgtgtcccttctccttgggagctccctcagggcttgtgcctatcctgtgatccagcctttttttttttttttttttttgagatgaagtcttgctttgtcgcccaggctggagtactgtggcacgatctggactcactgcaacctccgcctcccgagtttaagtgattctcctgcctcagccttccaaggagctgggattacaggcacccacccccatggctggctaattttttgtatttttagtagagacagggttttaccatgttggccaggctggtctcgaactcctgacctcaggtgatccgcctgtcttggcctcccaaactgctgggattacaggcgtgatccaccacgcccggcctttagtaggttttggttgtcttttttttttttttttgagacagggtctcactctgtcatccaggctggagcgcagtggtgtgatcatggctcactgcagccttgacctcctggcctcaagtgatcctctcacctcagcctctcgagtagctgggattacaggcatatgccaccaccctggctaatttttatattatttagtggagtcggggttttgccatgttgcccaggttggttttgaactcctgggctcaacagtccacccaccttggcctcccaaagtgttggggttacaggcgtgaaccaccacgccttggcctagtaggttttctagaagcacctgaggccttgtgaaagcatggtgtcatggagtagaggacattcaactctgttcccagggagcccaaacacaccccctgcagccaatctcaacagtcatgacatggccaggatgatgtggggagggggtggtgtgaactgtgtgggaggccagcccccctgggaagggggctggagtgggcttggctttgaggaggattcacaagaagaggaggaggaggcggtggcatgctcgtttgggggcatggcctgagccagggtgggcacctcttcgtttaggtgtcaccttcttgacattccagccgggacatggtttccttggggaagatggacacctccagaatgggacatcttctgttctcactgttctcccagcacacagttgtattctctcgcagttctggaggctgcgagatctcctggctgttatctagaacaaacccacctttgagcagcgccgccctaatggtggggtggtccctgcggggggaacagcccctgctctctcagagcttacttagagctagtgggcatgggggtggtgctagatggaacacccagatagatcatagagctggacagtaagcacagaggccagccagtggggacggagggacccatccatgaaaagacaccaagcattgaaagagatgagaggacggctggcaactggcacacatgtacattttgcgcagatggccaaggtggtgaggcgccagccacgcagacaactggaggaaggaggagtgccttgggggaggggctggctctggttctagaatgatccgcttgtgcgtgttggtctggctggaataaatcactgcatccacactgtagactcaattgtaagctcacaccagggagggctttgctttggtgcagggtcctgaatcatgagtcggccactggggggtgtctccaaggggactccccaaggaggggattcaacggatctcccagggaaggtcgtttgttttcttgggttggacctgggacaaggccttctcttgtctagtttctgttctccaacttggccacacggaaggatgttgaggacacctggaagccggcctctgctctacaacgcccataagacagcggcacaccatgtggggacagtttatacagtgctcaggaggcagggggcagatcagaggaccgtgggaggccctgggaaccacacgaggacccaggcattaagctttgcactttctggcatcagcccattgtacagtctggctctgtgtctaccccatgcctcactttccccatctgtatggggggtaataatatcctttacagcccaggtttaagcgggtgtagatgtaatgagctaggtaagcccatcttatgacattcagttctgggcattgaactctgggctttctggctggtagaagtggacattcaatcttcccttggagccctggggcttctgcagaatctgaacagagccagcagtttgcatgcagtggcagaggggcagagtggcaccgtggtgggagcccatacctggcacacccctgatcctggggctcaggatcctgctgccctgcagccatgcgatcagtcagaggtcatggctggacccacaagcgaatacagcctgtggatttgattttgtttggccctgtggtgttttattttatttttagttttagtttttggagacagagtctcgctctctcactcaggccgagtgcagtgacatgatctcagctttgcaacctctgcctcctgggttcaagcgattctcctgccccagcctcccgagcagctgggactataggtgagcgtcgccgtgcccagttaattttttatttttagtaaagtggggtttcaccatgtcagccaggctgcttggtgttttaaaaagggcttgttttgttttatgccagcgtttaaggatcaggagatatcatataaagatccagatttctactctcttgagaattgaacagctctggccacgccaggcccatatcctctagggcagtgatggagctgagacagggcctgggacaactgagagttccctggagtccacgcggctccttgcccagcttctggtggaggctgagcttagtgacccaggattttgtctgtgtccaccaagaaggagaggtgcccatggcttagagagggcgcccacaggagtgccttgcccaggaagctggcagctgaagcagccaggattagggggttgggcttcctcttcccctccccagtgccagagtgcatttggaggaagagagacaggtgaggggaaggcactgaaatggtcctggagagctattgttgggggctggggaccagctgtcatcccttttcctgtgggcaggggaggcagtggtgggatcccatgagacccggactctggcctggtgaggcagggagcgcctggggaaggcactgtgggtctccaggggggctttgctgggggagctgtgctgggagcctggcctagggaaggagctggtgaatgtgcctgccatgtgggcccctccctgctctggccctaataaccaggagcagctggctctcatttggagtgcggttgtggggactgtggaggtggcaacttcccaggtaccatccccactgcctccgagggagcagaccctggtgcctccaagaggcaggatggctgcagggtgggagctgggtggttggcatcactgcatgggtttgaagtattggatgggaagatgcaggagaggctgatgactgagaaagttggttcctgtggactaagctgggggagccggacaaccaagtggttagaaccttgggctctggtatcagcctgatgtacagtctggctttggtctaccccatgcctcactttccccatctgtactgggggtattggtattttttacgttccagggttgagcggctgtagatgtgatgagcgcggtaagcccggcgcctcgccggcactgaaagctccagtgttcgctcttggtgtccttgatggggttttctcctcactgtggttctgattggttacagttgtggtcacttattgttggaggtgtgtcccccactgtggctggtggtagaggtgtttgctgctggtgtctgggtgtgtgccttggctggaggtgaggagggataaaaacagctgcgacaagaaggaaatcaaggccgggcgtggtggctcacgcctgtaatcccagcactttgggaggctgaggtgggtggatcacttgaggtcaggaggctgagaccagactgaccaacatggtgaaaccccgtctctactaaaaatacaaaaattagccaggcgtggtggcccgtgcctataatcccagctactggggaggctgaggtaggagaattgcttgaacccaggaggtgccattgcactccagccagggcaaccgatcaagactccatctcaaaaaaaaaaaaaaaaaaaaaagaaggaaataaaagtcttctctggaactagaacgttcctgtgtagacgtagctggagggggaggctatgtggtttgcaccgtggccatggccagacacgatgggcagcgtcttcctgctccagcctgcatctctgccccagaactcatgacaggtctcctaggatggggctgtccctttcgcttgctgtgggtgtcttaggatgaggctgtcccttctgcttgctgagacgtgaaggacaggaagagccccggggccctcagcgcagcattgcctgccttcctctgctgctccttagcaggaaacatgccggagtgttcccgagccgtccactcaccaattgtactccctctctttatttttcagccttgaagagatcttttgaggtcgaggaggttgagacacccaactccaccccaccccggagggtccagactcccctactccgagccactgtggccagctccacccagaaattccaggacctgggcgtgaagaactcagagccctcagcccgccatgtggactccctaagccagcgctcccccaaggcatccctgcggagggtggagctctcgggccccaaggcggctgagccggtgtcccggcgcaccgagctgtccattgacatctcatccaagcaggtggagaacgccggggccatcgggccgtcccgatttgggctcaagagggctgaagtgttgggccacaagacgccagagccagctcctcggaggacggagatcaccctcgtcaaaccccaggagtcagcccaccggaggatggagccccccgcctccaagatccccgaggtgcccactgcccctgccaccgacgcagcccccaagagggtggagatccagatgcccaagcctgctgaggcgctcgccgcccccagcccagcccagaccctggagaattcagagcccgcccccgtgtctcagttgcagagcaggctggagcccaagccccaggcgcctgtggctgaggctgcaccccggagccaggagggtgagtcgcagagcactgggtcttggatgcggtggtgatggggacctggttgctggctttgccacagaatcttggaggaagaagctggatatgggtgggggatgctaccctggagacccagaaagaatggaatgcatgggggtgggagtctgcaagctcaggagaggtggctgtggctctctctgcctgatgggaacatgccaggatgctccaagtgggacttgagtgagagtttggaaagattctctgggtttcaagagcctcctttattggtcaccatgggccttggtaggacctctgtctgctgtgtgtccctggagggcctgggagacttggagaatgaggagccatgcaggaaccagggcaggctcatgcaggggtgtgggacagggtggggttgagacccctggaagggctgtcacattccggtgactcctgcttgaggaattgcaggctgcctggatgtgcccagcagagtccgagggcttggggaagggaggagggacgtatgcctcccgaggcttgcatcggagctcatgacctgctcctccttccccaggagggatggttgtggcagagggaggggaacatgaggagcaccttaatctgcaggataaaacactcagggcactgggaaggggttcctggaccaggggactctgtgatacctgcacacagttttatttgggggtgcccttctggtgagaggagagaggccacggggctccagcagtatcctgggagggctcaagcccagagctgtgctgacgtggagcttacgggcaggggattggtgccagtcctgtgggacgcagggcctgtttggaactgccaggctgtgggacatagttggctctcttctcagaagtgtgccccctggccccagcagggatcgtggctccatggggctatgttaaggtgccagctgggtcagaagcccctctagagccgggtccgattctgggcacaggatccgaactcagtatactatgttcagtaagccttcttagggttggacaaacagtacagtctgggtttttgatttacctttttcttcttatttctaattgtggtgaaatacacaacatacaatgtgcaattttagccactttgcagtgtacgtttcgtggcattcagcacattcacagtgttttgcagttgccaccgctgtccatctccgggacccttttcatcctcccagaatgaactctgtccccgttagacaagctcaccatgcccctcccccagctgctggcagctaccattctattttctgtctttattatgaacttatttgaccactctaggaaccttgtgtgagtggaaaaatacaataatggcccattttgtgtctggctcatttcactcagcatgacgtcctgaaggttcatccgtcatgctgtagtatggggcagaatttccttccttttaaaggctgaataatattctgttgtgtgatgcacctgtgttgaatagctgttcctccatcggtggacccttgtgttgcttccacatctctctaagtccctactttccatcttctttgacttttttgacacagggtctttctctgtcctccaggctggagtgcagtggtgtgatcactgctcactgcaacctctgcctcctgggctcaagtgatcccccaacctcagcctcccaagtacctaggaccacaggttgcacgccaccatgcctggctaaattttaaaattttttgtagagacaggttctcactaagttgcccaggctggtctcaaactcctgggttcaaatgagcctcctgcctcggcctcccaaagtgctgggattataggcatgagccatccaacctctatttggtttttctttttgaatgagagttctcaagtggtcagtgggcttgggggctgggaggacgtggggcctggagagggtgtgggtcggggggagaccagtgctcctcatgctttcacgggcatgtggagtgcacattcgtctcagcaggtctgaggcctgggactctgcatttcctacagagggggtgtcagaacacactgagtagccagaggctagcgggccttggaacgtcctttccagccctcagtgtgcgaatccgtgttccctcccccatctctcttaagcttgactctgcagagccaccctgccccagccgcccagactcagtgacagtggctgccagtggcatggtgtcaggccaaagggatgggcagtttgcagagtggcaggaggctgtttcctccccagccttctgttggtgcaggacctttgtttgacgtgccggatacacccacctcctgggttgatgtgttcacactcagctgagtcaaacaggatgtggctggggaggcggttgtcactgggccgtctaaatcttggtgacggctggtgctggatgcacagagacatggtcctggctctggggaacgggtggggggatgtccatggggatgtacaagaacatcctcctccaggggcagacacagctcagcccctaaattgtgccagagactgcactgggagccagacccagggacacatcctgcaggctctgctttctggagctcaccgagccatgagcaggatggctgggacacaaggagtgcccagggagcttccccagcagtggaagtgcaatgtcatcaggccaggaaggggagagaaaggcaggccacgtggaggcagcagcgttcagagctggcaggagcctggtgctctgggggacggtggctttcaacatggaatacatgttggagccggggcatgggagaaaaccatcagcatcccagacccggccacccctggatggggacctgtgcaggtgggagtccagcccgcgtggagaggtccgtgggctgggctgacggtcctgagggcctaagcaagtccgggtggaggaaaggcagggagagatgagggcaaggccttcccgatggaggggtgctcttgaaatccaatgagagtggcttcttgggggacccaggcctgagccccactagctcttcctctgaggcaccacctgcttgcttctccgttcttcctctctgtgtcacaaccgttctggacacacatccagttctctccaactcggcttcctgcccatctttcctgcaggtccagcaggcccatccccttctgcccctccatgtgggctgggctgggagctccctgagcccccacatgcacagctctgaccaatctccatggcccctctgaaccctgagcaccagggatccagctggcaccatggggaaagggatcagggagggagtttctgtgccctctcagcagatgcccagccccttggcttctgcctgcgggagggcgtctatgctgtggtttgtctccaccccagagccgcaggcacagggcagggtctcctggggcccagctgaattgctcccagactgacttccccaaagcacagctctgctgagatctcttcccatcctgagccttccctgctcactcaccgtaggccccgccatggttgattcactctcctgctcagctcacacctctctgcttgccagcttctcctgctttggtctttccttggtctcccacacctttcctcacaacccctttgccctgacctcctgaaccctgacctctgcttctctttttttttttttttttttgagacggagtctcattctatcgcccgggctggagtgcagtggtgtgatctcggcttactgcaagctccgcctcccaggttcaagcgatttttctgcctcagcctcccgagtagctgggactattagcgtgggctaccactcctggctaacttttgtatttttagtagagacagggtttcaccatattggccaggctggtctcaaactcctgaccttgtgacctacctgcctcggcttcccaggactcccaaagtgctgggattacaggtgtgaaccaccgtgcccagtctgtcttggttttttacaaagaaccccgtaagaggccgggtgcagtggttcatgcctgtaaatccagtactttgcttgagcccaggagtttgggaccagcctgggcaacatagagaaaccccgtctttacaaaaaaatacaaaaaattagccaggcacggtagcatgtgcttgtagtcccagctacccaggaggctgaggtggatcacctaagcacgggaggctgaggctgcggtgaactgagattgtgccactgcactccagcttagggacagagtgagaccctgtctcaaaaaaaaaagaaaagaaatcccctaagataccaagtaagtgacttggacataataggtatgccgtgaaattatgctgaaagagtgagccactggtggtgagatgggggatggctttttttgtggttcttgcagagatgtagtgacccccttgggacatccctagggaccaagcagaaacttgcctggtcaactttacccccagggcacctggtgtctcctctggaggtcgtgctggagggctcagtgggtgggtgtcagcttcagtgtgggggttctggaaggggtcagcatttcaggaaggagtgtcggcacctagatggttgaaggggagggagaggaagagaggagctgcagagggcagaggccaccctgcctgctcctccgccccagggcctggtgaggtctgagctttatgctggtgcggtggattctcggtttctgaggctctggccctgcccttgaacttggcaccctccttgctgtcctcccacaggaccctcgtccttcggggtcatccctggtcctctcaggctctgggtggggacggccttgcctcctctcccggatccctgctctttccctgccccccacatgggtgcctctggatggggcgaggctgggccgcagcacccaggactgagactgcaagggctggccgctggctcagagcccccccaccagagttactcccctctggctcctcagccacaccagccaagtttctccagagctgccttataaggcaggtgctcagtgctcgtccgtgggtctggttctctgccttcttgggatactcactgggggcaagagggaggccaggcccggtgcccagctcagttctgggcatgttccggctctgccccatgagccaactggttctgaaccatcacttcacccctcccagcctcaatttcttgatttgtcaaagaggcatctgcagaggtggctgggggctgagcgctcatgtatccacccaccccaagaaccaagaagggagtccacggtggtgctggggccactgtgaccatgggtgtaaaattggggcggggtagacatgacagcatgtctcagtagttttcctgtgacccagagggtctggaaatctttgtcgtgtgggtggagcgttgagggagctgggagtcaggcccccgaagccgatgatggtgggcgtggctcttcgcatacttggtccgcaccaggccctgtgttccggggacagaacagggagcaatctcagctcagacagcagggctgccagtacagcattgagtatagggttaatcaaagcccagggctccctggaaccacccaacgcagagcattgaagaggtggctttggggaaagtggggtcagagctgagcctgagtcgggggtggggagggtgggcatcagcctgcaagggaggaacacctactaggccccagaagttcctggtggggatcagggactgtgaagttggggagagcgtgactgccgtgatttagggaggaagggccccatagacagcccggctcctggccccatgtttacaggacaccccacataggctctgagcctgtccctggacggtggactccctgaggcagggtctgcaggttcgtccagtaccaggtgtgaggcaggggaccttggtaagcgtcgagggactcactggtgtctgatgaagcagtgagtttggatcgtgtcatgcctggggtcctgagcctgcaggatttttctgtgtggggctgtgtgcttctgcttctggaggggcgaaagccgggtgtccagaaggcaccgatgttcctgccgggctgccttactcagaaggtcccgctgctcccacctcctcccattttcctgagctgcttccagagggcacccaggtccccttttactttgggattgggtctctttctctttccccttctaagaacaagtaccgtccttctccgagcctctcagacctaggtctagagcaggaagtcccccatgtgctgggggaacaggaggatcaatggaggaggagcggccaggccaggtgtgtctccttcatggtgggacgggctgggcccagagaacagagcctggctgcagggcccaggaagagaacccttcccctggtggcctgctcagctgcctgccaagtaccctgcagtggtgagaggaaaggagggctggtctgggaatgcagcgggtgccgagcagctgtggaataccttaaatagagcgggcagctgcggggaagggtggggccaggaggcaggcactgggggtggtgtctccactccgtcccctgcagctctgtggccctgaccactcagcctggccccaggatggagccccagcccccagacacatggcagtgggtgaggcctcctctcagcacttgtcccaggaagccagagcagctgccagaagagagaggagctgtgtctgcacccgcagcctcccaggcctgggacagctgctgggattgagggtctgcacaatggcgagcctgtccggaggggcgcgccccggccagacagccatgctctgtgcggtgtggacagagggcacattcaaccctgcaggagtgcactcagactccccgcccggggccccgaagtgtgggcagcccctaaccagaccctggattccagcagacagcctgggaggatgccgtgtggtccaccctgacacactgtgtcacctgggacctcatgtctgagagctgccgggaggcgcttcctcggttggactccacttcctctctggggttttctgtgggtgcgataagtgactgtctctcctgcagtccaagggggctcctgggggctgggctgtaactgacaggctagagtagcccatggccagggctgagcttccttcccgttctctccaaacactgagcccaggaaggggttaaagtggagatactctgaggcatggagctcccccaaccctgtccccccatcccactactgggtgtcctctgtggagccccgggactcttaaggaacccagagtggagattcctggtctcatccagtgcaggtgagggggaaagtgatttgtccacagtcacgggtcaagctcgattccgctccaccgccccagtctgaaacctggaactggaaatggccctggagatcactgattccatctcccgccttccaaaatggcccgcaggggtgacgatgtagatgcctgtaatgccttgcccacttgtgtgtggggaaaaggcagaggagcaccggctctgcgctcacactgcctgggctgccgcccctgccctgcctaggggctttcctctctggtcgttttctcagtgtggaagtgggtacaattcttcctgtgcagcgtggtgagagtgaacagtgataattcgcaagcagggctggagcgcctgggggattgtgttaagcaagcatataaacaaaagccaaacccgaccctgatttaatcagcaggcaggccttgtctgaagcccccgggcagcatctcataccatccctagatttcaggccggtggcgtcgccccgtgtctctcccgcccgcccacaagctggtgtttagaagccctgctctgtgttctggctcccattctccctgtgacctttccctttcttcatcctaaaaagcaatgcacgaccgggcgtggggacaggcgcctgtagtcccagctgcttgggagggaggctgaggcaggagaatcgcttaaacccaggaggtggaggtttcagtgagccgagattgcgctagtgcagtccagcctgggtgacggaacaagactccatctggaaaaaaaaaaaaaaaaaaaaacacaaaaaacaatgcccagtcattcttagataaaaaatgaagatcacatgaaatttcgaaaggaagtttttctctcccattccccaactctttcccaaggggtggccatgttgacagctgggtgtggcattcttctgaattttatttgtgcagagtcattcagggcttgtgtaaaaaaagtcaatgtgtaaatttagacttttcaagaacacaaaggaaatcagacttctgcaaccagcttttatttttttccatttgacaacactgttgccacttgtagatgtagcatgttactttttttttggtgaccggactgttgaccaggctggagtgcagtggtgccatatgggctccatgggctcaatgtaacctctgccttcccgttttaagcaattctcctgcctcagcatcccaagtagctggaattacaggtgcccaccaccctgcctggctaatttttgtatttttagtagaaacggggtttcaccatgttggccaggctggtcttgaactcctgacctcgagatctgcctgccttggcctcccaaagtagcacgttccttttcatgcttgtatcatcagatgtcccatggcgctgccaggcttgtccagcttcctactgtgattgagaggctgcaacagatgttctcacacttgtacatgtgcacacatgactaggatgagcccttaagagtgaatttctgtgtcaaggatgtgtgcatttaagttttgatctgccgggcacagtggctcacgcttgtaatcccagcactttgggaggcctagatgggctgatcacctgaggtcaggagttcaacaccagcctggccaacatggtgaaaccccatctctactaaaaatacaaaaattagctgggcatggtgacttgtgcctgtaatctcagctactcaggaggctaaggcaggagatttacttgaatccaagaggtggaggttgcagtgagccaagattgcgccattgcactccagcctggctgacacagcaagactccgtatcaaaaaaaaaaaaaatcaatccttgttcctgaattggcctctaaagtggttactagaattttttaggacccctcccctcgctggcctgctcaactgtctgctgggccctgtgcagtgatggtccagcagggaggtcctatgcccctcacccctggctgagggccagacgctttccaattggtgttttattttgtgcatctcggtcaagcgagagggattatctcttcgtatgttacagaccagggtcctgtgttctcttttcatttggatggttcatcctttccttgttgaaatgttttaaaaagagttctttgtaagccaggcgtggtggctcacacctgtaatcccagcactttgggaggctgaagtgggcggatcgcttgagcttaggagttcgagaccagcctgggtaacatggcaaaatcgcatctctgcaaaaattagctgggtgaggtggtgctcctgtagtcccagctacttgggaggctgttgtgggaggatcatttgagtctgggagtttgaggctgctgggagctgtgatcgtaccactgcatttcagcctgggtgagagtgagatcctgtcttaaaaaaaaaaaaaaaaagttatttgtacatctttatcacagcaggtatgagtgtcttgtccccagctgcctacttttgattttatttctgtgatgttcttccacacagaacattttaatcctgtaatcctgatgttgtcaagtctctgctttcccttttagcttttggaattcatgtcctgtttagaggtctcctgcattctgaaattataggaaagaatttcacccacgttttcttctagtacttctgtggtttcatttttacatgttggaatcatgaatccattggaatgtattttggtttcagcagcgaggtaggggtagatggtattgcctggatacacagcagcgagcttggtctggagcgggtggggcgtgtgtgtgtgtgtgtgtgtgtgtgtgtgtgtgtgtgtgtgtgctatttttatcagttttggtgtctgtattgtgctggcttagcaaaaacaatttggatgcatttcttttcccctctgtgttctggaacattttaagcagcaacataataatctctttgttaaaacttttcaagaattcactagtgaaaccatctgggcctgatacttttgggggagtctatcactttaaaaatttaaattttttccatgggtctttcagttttggagtttttcttcttaaaattcattatttttttcctagaaaagcgtcttttagcttgtttaaaatccctcggctttttccgtgggggttactttagctcacttagtgaggacagcgtgcagcggggtgattgacatgattggtcagcagagcacgatcgatcggtctgtgtgcaaacatcactggctgtggctggcgtcctgggatgctccatgttgaggcacatgtgtgcagtgcagggtgatgtgtattctgagaggggatgaagccacaggacccctgcacccttaagagagaggctccctccccatggctgcagtcttgagtaggtagtgacaggggactgggtctgggggtggctcagtggttccagcaggccaagggcttcaggaattatgagaggtttggagctgcccagagagtggctttcaaaatcagtctggactgcagcctccagaaagacatgcgcttgacaccacgacccaggacacacctatatggggtgggggtgggaggtggaggtatataaatgaaaccaaatttccatcatggaattcttacctttaccatgcctgcgctacacttcggtattttctttttttttttttctctctctctctctctctctatttttttgtttgtttgtttgttttggagagagggaaggcttttttcatttttttaaaacagctttattgagattcaagtaagctactatacaatccacccatttaagaaagtgcataattccatggttttcagtctattcagagagtagtgcaaccatcatcaccacaaccaattttagaaaattgaaaatttgagaaatttagaaaatttttttcttaagaagaaaccgcgtagcctttagctatcaatcctgccctcctcctccatatctcctttctatctgtgtggattccagacttttcttttcttttttttttctttctttcttttttttttcttttttttttttttttaggtagggtctgattctgtcactcaggctggagtgaatggctcagtctctgctcactgcaacctccgcctccctggctcaagccatcttgccaccacagccacccaagtagctgagactacaggcctgtgccaccatgcctggctaatttttgtatttttttgtagagatgaggtttcaccatgttgcccaggctgctcttgaactcctgggctcaagtgatcctcctgtcttggcctttcgaagttctggaattacaggcgtgagctactgcgcctggccgattctagacatttcttgtacagagaattgcacgtttgacctttgtgtctggcttctccacttggtgtcacgtttccaagatccctccacattgtagcaggtggaatattgagtaatattccgccgtggaatggactgttccactgtggacagacacgttgccttcatcagctgagggacattgggatgttgtcaccgttggcctttcgtgagtgtgttcttttcaaatgaaaaaaaaaaaactctggtcaccacctactagatagttttcttggcccacagggtgggacaagccggcctgggtgagggcagggaggtggccaggtggaggcagctggagtggccctgggttgcttctgggcgcagcaggcagaggtgcagaggcagagcctgagcatgttccgtgggcagatctccatcctgggaatgtttgtttattcaagaagtcttggccaggcgtggtgcctcacacctggaatcccagcactgtgcgaggtcaaggcaggcagatcacctgaggtcaggagttcgagaccagcctggccaacatggcaaaaccccgtctctactaaaaatacaaaaattagctggtcgtggtggcgtgcacctgtagtcccagctacgtgggaggctgaggcaggagaatctgcttgattccaggaggcagagcttgaacctaggaggtggaggttgcagtgagccaaaattgcaccactgcactccagcctgggtgacagagtgagactacgactcaaaaaaaaaaaaaaaaaaatctccaatgctgccctgtgcccggcactgaggcgggggagtgcagcactggtatgtgcttccagcccaccgggctcctgtctggagctgacgtgcgaccaaggcacatgagggaagcacggtgaggtggacggtgcgcaggcataaggagcaaaataaggcagacgcggtggctcagtggctcctggtagctgcgaggagcgtgggcaggacagacccaggagggcgcttagagagcagggctgactggggcaaggtgtgtcaggcacttgtcaggagcacaatgtaaggggacaggaaagagctcaggaatcaacacagatagtatttaatgcagtgtttttaaatattgaaatgatgcaaagtaacctccatggtgaacaaatgttggaattttaaataaagacaggcccagccctgcacgtgcacagccatgtcagagtttgttcagcgtggaatttgatttgtttaaaatgttactttaaaatattgtttaattcctggattttttggcactcccttaacttttgcacctggacgaaggcctcaccctaatcccagctggagagggtcaagggctggtgaatttggctttggacctgcagagctcatggtacctgagaggtggggccaggaacaggaaggagctggtgagaacaacacctggacggggccagatcagagcagcactgtggccctttccaacccatggttttgctgctggatgcttggcaaatcggtgctgagtccccggccctctgaatggagtgtgatgagtgacagggctggggagctctcgggcccctccctgaagcggcagtgaagccagggatgtgctgacagcaggcagggagaggggcgtctgggtctgtgcctggagccagctgccccacggaggaactgggtgaggatgcggtgggaggaagaccttcccagtcctgcatcctccgaagcataactgagtgcttgtgtggcttgggggtcactctggtccgaggacggtcttgctctgcttagccaggctttgaagagccactgggatacggacagcagccctgctgggtggcaggttgtccactcttgcctgcttcacactggaactggatgccgagcacctggatagccagtcccagagtgtctctgacactcccagtcacctcatcccttagaccaggataagatgggggaccccaacctgagcctcacatgggctccattccatgtgctcccataagccactgggcccacctcctggctgcagggctgcctggccatttggtgtcttggtttccttgtcggtgcagtgcaaataatagtcctagccttctcgaggagttacaagatgcttttcatgtgaaaagctgggatttggtaccaaactacctggatttgaattttggccctacccttcctaacctgtggctttgggccagtctcacttccctgtgcctcagtttccccatttatggagccatctcattgagttgttgggaggatgaacataaggaagtgtactgatgtgcccagagcattgtgattttacttattattaccaaaccaggcacacagtaagtgcctaatagatgctcagtgttgtttcacggacttctgtatgccttgtgtgtctccagcagcctagctctcaaggtggggaagctcttgatgagttgcgggggtaattagaaagaggaggcggcaggtgcgagggtttgggtgacacctgtggacagagagaggccgatggaccctggcaggggggagggggtccttgcacatagaaaacatttcctgcatccaagatccttgtgactctggaacaaaggtggcagagatctgcaaattccaaatcataaacccagaaagcatagaacattcgtagggaggaccagaagcatcatgtatcttagtgtgtatagaattttccacatagccaaacaaaagcacgtttctaactgaagctgtcggagagttcctgagcactttataccagacaagggccggtaagtggaagttcaatacgcaggagccattccttttgttcgcgaatgtttgctgtcttttctgtctttatccgcattcaagtgagggcactcataggtccaccgtccagccccatgctttgtttgctactgaaaaatatcttaagagctccacagctgcaaatccttctgtcggggggcggtgttccaggaacccagccttgctcggggctgaggcccctcagcacctgctgcacaggcattggtcattaaaactaaagtggtcatgtgctatatccatgggccctcagggtctggtggcacctggtcacacagtccagtggctgcctcccgcctgccggacaccgggagtgggggctcctcattcctgttccctggcggtggggggagtgactcgagctctcacacatcagaacccaccgattcacacgctggggcaccttagagccccttgacagcctctcagcctgagagaccatcaaactgagctcctggagagggtggcccttgagacctggacacaggtgtggacaggatagccctgcctcatcttggagtaccgcttgggttcagcctcttgtgggtctgaagctcaggctgggccagttcctgcccctcggacggccggaaaggcagcccagcctcacagcctccttgtcaggctctgaaagccacccggcctccggctctgctttattttttaaagatggagtctcactctgttgcccaggctggagtgcagtggtaccatctcagctcactgcagtctccaccacctgggttcaagcaattctcctgcctcagccttccgagtagctgggactacaggcacgtgccaccgtggccggctagtttttgtacttttagcagggatcagttttcatcatgttggccaggctggtcttgaactcatgacctcaagtgatccgcccgcctcggcctcccaaagtgctgggattacaggtgtgagtcactgtgcccagcctccagctctgctttgattttccctcaaggctgtgaggatgtccacgcctcctcctgtcctcatggcccattgatgtctccagatggtccgcaaagccactttcccctcgggagctccccagctggtgagggggccctttggggatcactgtccaggcagtcatggaggcccgtgggccctgcttcctggctgaactgagacctggtgcatggggtgcatctggtctgagccgaggcccctggaagccacagccgggaggcagtgagggacggctgtcatgtcccctctcctctgtctcccagggtacctgcggggcagatttccctacctgagcctcccagttgcccataccctggcctcccaaagcccagcccaaagccttaggcaccctacaacccgcttcctctagcctgccctgtctcttctctgctgatgttcctgaaacttccctgcctctccttacctcttggtaagagagagactggagaccccgtgggaacccccgaggggagggagaagactgctgttttgaacggaggtggtctttccctctgtccctccccaggcgggtcacacttgtaggcccagcctcctgctgtggcagcgcttggggtgttggctgcctcctgggcaggagatgggagctgagggaggcgctttcaggaccagagtgggaacccagccggaggaggagtaacaggcctgtggtcagcagcagctgctgcagggaccccggagctatacctgtgccccagctgacccctcccgcttccctagggcgggctggggatggtggtctgttgcccagcccaggaggaagaggggccgtggtcagcagcagccaccttgaggaccccagtgctgtacctgcgaccaggctgacccctcccgcttccccagggctggctggggatggtgatctgtcgcccagcccaggaggaagaggggctgtggcttccactctagaggtctttctcctggtccctcccccggtgctggtctaactgcaggcctgccttaggccgtggctccctgccggcacctgctgactaatgcttagctgatgctgataggagagggctgagatggggaagcagccggtcctggtcacagcgggctcgggttacacagatggttgaggcacctcccggccagccccggaagcaaggcctcacacagcctccggctcgcccactgcccgtgtgcatttctgggggccccatcccccaaggcccccaccaggtaacttcattgggctgggtgtcgctgcaaaaccacccattgggtaaggtggtttttttggtggggggtatggctggtgagaatgcagtggaggagaagccagctccgtggttggggggagtgtggaccccccgtttcctgtctgctccctgaactggagctcatggtccctcccccaggcgcctgggccatggaggaggtcacagccctgccttattcctgtggcagcctacgggagccctggccagtcctgtgtctcctgggagggcggcaggctggtcaggctgcagggcaggcctggaatgcagacccccacttggccatgccgttgcctggccgctctgtctggggacgttctgttcaggaagagagaagcggaccagacaacccggctcagcaattggaagctcagctccccatgttcagtccagcaggaagtttgcctccttgcaacactggcgtgcttctgcacgcgccttcttggctggtggttctgcgaggcccccactgggctgcgtgatgtcctctggccaccctggccttggtgcctggcccctatgaaacagagacacctgggcagtccccacttgtgcttgcaagcctgtgggacatgtggcttcagtgatggctgattctgtttcactcagaggccctgggaatcctcagcccaactgtccagaggagtctgtctcagtggggaagagtctgagctgtcctcctggtagacagtcctttagatcgctggggtacttccctgccggccgttcctcctgctgtccctgctcctctgtcccccagccgtctcccaccctctcccctgcagcagccagctggcacggggacctcaccttccctctgggattgcgaatgagacgacttccctcgtccttccgggtccagatctttccggcaacagtgagtgaaacccttgtctcaggtgggaggagaaggctcagtgtctggtcacaatgacggtcctaaccacatcactctcaaacaaacgctggctttcacttaccccttgccctgcccaacagttactttcattatcccattttccagattaggaaatcaaggcgcagagagcttcagccacttgcctgaggccccacagttaagtgtctggatttgaaccctggggcagcctggctgctgagctgtcctggatatggggtactgtgcagtggtggggtggggtggagctctaccgtcactgaccctcgggctccctggagtgatagcacagccccttgtctgggcccctgcctgaggctttggctggatgccgggagcccgagcccttccggctctttcctgtgtaaggcgccatggggtgaaatgaaagaaaaccccagttagaaggtgtctccctcttccttcagtccctcagctgccctggattttgaaataagacaccgcccgtctgtggggtgagcaggaacagattggaacctcatttctctcccgctagtcacagctgccaggagctcatctttctctgtctttctcctccccctgctgcctctccccacaagacctgggctggatcctgctgggaaagccaacaggaagtcttttggctgcggtggaggtgggggtctgtgcttccctggggactgagatgaggttggaagtcttttggctgcagtggaggtggagcctgtgcttccctgggcacgaagatgaggttggaagtcttttggctgtggtggaggtgggggtctgtgcttccctggggactgagatgagggctctaggctggctccagcaagagcagggaggcccacatctctgcctactggttttacttcctgtcctgggggaaggtatccacatgtcccagaatgcgccctctgtgtgtacagggatggcttttgagcgattcacgtgaggtttaatgatctttctctttggaactggagtggcttctccacggtcgatcgggctgagctgctgagctcggtgcctcagccggcatctttccccaggcgcttcctctcaccgcactggggtgcaggttgttagtggatgggtcttcacccttggggactggcagctgccagcttattgcacagtcgtcctggccgaaggttccactaagctccttggagtgtagggttttttttgagacggtctctctctgtcgcccaggctggagttcagtggcccaatctcccactcactgtgatcttgacctcctgggctcagtgatcctcccacctcagcctgccaagtggctgggactacaggcgtgtgccaccatgcctggctaattttttaattttaattttttttgtagaaatggggtctcactatatttcccgggctgacctctaactcctgggcttaaatgatcctcctgccttggcctgccaaagtgctaggattccaggcatgagccattgtgctcgtctggggttttcctttaacccttcctggaccttcccaggtgcaggaagcaggcctcagccttatgtgttcttgaacagctctggactctgtcctgtgcctcctgggtgcgtggtcaggcctcacatcagcaggaacctcaggtgaagagggaggcagaacggaatgcttgtcatcacccagcctcggggccaggcggggcggccaggacagtagtagtggctggcgtggcttcctgggaggtcagcccattggtgtggctggggaatggggaagggagcttctccccttgtctcctcttatttctggtcattgggcctccagggccaggtctccagagttctaggtggaggatggaagtgggggaagctggggtgagagcggggtggggtggggggtctgggggatcctggaaaaccgtcctctgcaggtcctgcttttcccagggagtgcccagggctggtcccagggagctggactaatggtcacctcggatggtgcagaggcccatccccaggaaatggggcccacagaagcttttggttctggttctgttctgcttccgaagtagggctcaggatagcgctgaattccctgccgaaatgcagcttcctgggccctaacccagccctcccgaaccagaggctctggggtgggccctctgcttgtctagcagcctccaggggacacttctgcctgccagagaaagtctaataagcactgctctaaaccccctcgtccccacagccttctggctcttctcctttttcctgctaggatctgcatcaggattaaatgccaatgtcaggggtaaggttagacttgtgaaccctgagacaatacctgcatcttttttttttttttttgagaccgtctcgctctgtcatccaggctggaaggcagtggtgcggatctccgctcacggcaacctccacctccagggttcaagcaattctcctgtctcagcctcccaagtagctgggactacaggctcgcaccatcacacctggctaatttttgtatttttagtagagatggggtttcaccatgttggccaggctggtctcgaactcctggcctcaagcaatcccctcacctcagcctcccaaagtgctgggactacaggcgtgggccaccgcgcccagcctgatacctgtatcttgaccaagctgttgtggaaacattgagttccccttgatagttctgtccactgagtgaatgtttaggaaccggccaggaatctcccacccccacccagatcgcggcctggaggcagcgtttgtgaccctgtgatgggatttgtctctcttgcccaagagactttggagatgtggcccctaaatgcgggggcccctgttggggtgggaacgggagctggccctggcctttgtccagtgaccccgtctcagtgcctcgatcctagcaccctcaatctcagcgcctccccttccccggctccgcgcagagatcacgtggcttacgctgagtaatcctccaccgcccgccttgtgttcctgcttcagggaagcctttccagggagccagctgacacatttggcctccattatttgtttttgaacaggaatgaaaggagagagtgagtaagaaagtggcaggaggtgggggttgcagagtagggaaaggtcagagaaaggggaggaaagatctggaaagtccagacatgtgctctggaagcaggtgccagctatgagctcatctggagggtggccacccgccctgagccctgcctggggccagtagggaacgctctgccagggcatggtcactgggagcttgtccttggctcgctttctgctgctttgagcgctgagcagatttgtttccattttagggacaacgcagggaggctgtcattccaccccttgccttattaatatttcatgaatcataagtgaccacttactgcatcctgacatactccagacgctgggctcgaagctttatgtgcttcatgggacgtatccgcaccattgccgtagaaaacggtcctgttactaccgtagagaagaaggcaccgaggcacagagaggttgaagaaccggccccaggccacacagctagaagcagctgaccctggctttgaacatagggctgcttgactccaaagcctgagctggtttgcagttaagctcacggtttctatgccactgtttgagcctctggtcgagccccttggctcagtgggggggcccatgacccaccggctgttccattatgtgttgtggacacctccacggcccacctgggtgggagggaaggggcttcaggaggtgggaggggtgcagggaacagagtccagcctgcttgggcccaataccttgaccttcaaggtaccctttgagggtggcatgaggctaagctctcgttcccctccaggactctgctcctgtgagcgcctcagggtccctggcttttttctgggggccttgctggtcaggatcacagagaagctctttgctgttgatctttctgcctccgtatcttttggcaagccattttatgactcagttgctttgtctgtaaaatgggttgaataacattgtcctgcctcagagggtttttgggaggatcaaatgaggcctgtggcacagaagccctttgttaagccatgccgactagcggttggcggacccccaagtgaatgggcacttgggtgctgagtgtgtggactcagtatcaggaggaggggctgggggatgcctagaactcctgggaggctcggacccctactctgctcagaatctgagctgctccttggccagtttaattcccgtcactagggtgagggtaaccaggacttacgcatagttgggcgaagttgagtgaccacatgtggaagtctagcatccctcgtgcaaagtgggcaggcggccaaagtgagctctgcaccagtccccccacccccggggctgttcctggcgccctgccctcccccagagccccactgacctgcaccacgtgacctgggcctgggaagatgggcccagctgtgggaggtcgtgcgggctggggactgagagtgccggaggaggccctcccaggaaaacccagctgcacaggaagccgggccagcggcctccggaagcctctgggctttgcaagctggactccccggatctgtgactgtggggccctctcctgcctgcagctgagagcccttgacccgtacctgagggcttcagaggtccgggagggggatgtgaccgtgtcctcagggtgcagcccacccgagtgccactctggctgcagcccccactcttcctggtcccctcgctggccatggggatgctgcctgggaggttcccttacatggaaggagctgcagctgagctggcgggccccacacacccccgaggccacctgacttccaacctccaagtggggctgcatccaacactcaggacctggagcctcagccagagaaggaccccccactgcctctttctgtgtcttgggaaagggtctttgtgctcctcccccagggatccggcacacacatgttgggaggctaagaggaagctgcccacctgctcatctccccccacccccaccctcccagccagcagaattgtacctgtgtgcctagaatgcatggagccagaagtcaggaggttggcctggctgtgtccgaccctggctctgcggtctcggacagtcccagccctcctggagctcagggtcctgatctgtagaggagaggctgctgtgcggccccgcagggccctgtgcagaggggagtgtgcacgactgtgagttcaggctctgccctcagacaggtggataggatcggaacagtgggtcaggatgaccagagggtcccagcttcaggaggaggcctccgcacctcccagcacctccacaccagggaatgcagccaggaacccaggcctcccatctcaggaagcagcaccccgcgccccacctctggttgcctgggcctgagaagttgaggattcctcccaaatccgagtgccctctgacccctgcttgggtagttgtcccttctgaactgaccacctgtcctatactgtcgcctgtggtttgtcccacagggtggccagcgagtcccctgcacagcacacctcccccaggagcactgcctgtgagggtggtgtaaagggtgccccccaaccccctggaggtgtgcagtggcgggacagcatgagcccaggagccccggtgagctcctggatggagaatgtgttcagatcactccccagcctaagccttccctgggtgtctgctgtgcttgggatgctgattcatcctggggcagcctgtgagatcccacgtcacccggccactccccaccggcctcctggcctggctgctcctgggacatgagggctcatcctcacggaagaatgttcgcttgttccctcgcgggaagtccctccccagacctcctggccgcctcattcaggtcttgctgaagcgctgccatcttggagaggcctccctgtcacccgcagttaaagcagccctcccatgcctatgggtggttttctgtggggcagggatgagtattggagagtcttgccgtttatttgttcatatgccctctgggagggcacggggcactgacttgtgttgcgggtgccttgcatgtcacgggtgctcagtgaatgcttgttaaacactaggagagcacagaggagggaagcctctgtccaactggagcagtcagggaagacttcctggaagaagtggtatctggtggcttggaatgtggaggtttgtctatatgcagacattaggttagagggcaaaggggcattgtcataacttagcagacaagcaactaaggcattgctatgacatggactgctcatggttggagctaagaaggagtcagagagagaggtccctgtgctctggagtgagtcgttgcgggaggctgagctcccagaatgtggggctgcctgtggaaaggctggaggtgggagatacacctgtgagtgcaggtgagtgtggggtgagccactggggctggatcagaagatgggaatccctaaacctaccaaccagccttcgtgccctgggaatgacaggagacggggtttctaggggactaatccagcacaagtggatgagatgggatgcagggaaaagcacagagctctctgaggctttgggaagctgagttagggtagagccatgacagggtgagttccagaagcaatccaagaaaaaatagctagattggtttctcccttcactgtaggagatgccccacctcacttcccctgtcctccgggctctggctatgggctgggcacagtgaatgggttccatctgcaggggtagtcacaccctctggtcacagctgcctcatgcactgtgttgagatgggatccgaggccaggaagaacagcttcttctgtaggttggcattgtcagccttcggggagggaaggacggtggggtgcctggagcgtctcctgtttgccattcacactctgtgcctgcctgcagggccttgagctctgtctgttctgcctcagtcctggtcgggaactcgttggtacccataggggcagtcaggctggaaggaggagaccaggccggcagaggaactgagagggggccctgaacaacacccaggcctgagtcatcctgggctgccagacttgctatttggagctgttcccgcctgctcatgtgcaaggtcctgatccactcaggtcggtttaaccagcgcccttccccaggcccagtttgccttgttttcattcgattcatttattgtcaccgctgccatccttgcaccacataactagcctttccagcaggccagccaccaagctcagggccttcaccgcatctcctgtaaccctcacagcaacctgggaggcacagagaggctgactcgctggcccatagtcacagggcaggaatggggcattgccaggatttagctggatctctgactccagggccttgggtgggacactggcaaggacgcgaggtatgaggactggccctgccttggacagagctcggggagggtggcctggcaggcccagctgacacagtggctctggtgcaggttcaaccattggcaaagtgttcaagtacacacagaatctcaactggggacacaggcgaaacggtcgggcgtgggttgtgagtgatgggtgggcactctacctactggcaaaccagctgaccttggtgccttctggagcctttcaactttcttatccagaaaaagaggaactaacagttccatccccaaactgggtgggggtaccacattcgaaattgaagcaaagctggtccatgtcacaggctcggcagatgttagctgtgcatgcaagttagtgagcatttgaagtaggctgtgcggctgcatcctcatcttgcaggtgtagtccagagaggttagggcactaaccccgggtcacacagcaacagctcaggctacagagagcagtgctgggtgggagggtgccggcagcttcaggcacaggctgggagggctgtggggtcagagagggagggcgcacttcccagctggtagggttcacttgtgcctcagtactcgtgtgggctcaaagcagctggaaggagggaggttagagccacccctgggttcagaatctgataagctggttatttactctgaatttgcctcatcgtatgtaaattggggacaaatttggggatttaatggtataatgtaagaagcagacatgtcacagccctgggtatacagtcagtgtataataagcggtaagtccccggcagccggtgggaatgggaacgtctcagcagccctctgcctcctgctcctggttgtggatgtacctgttcttggctgtttgtgccccagctccatgtcctccagtgtgtatgaggccgagctcctggggtgggggctgggggctgtgtctgcagctcctgaggccaagaccaaggccaaggtcgaggctgaggctgagaccgccttggtgaggaggaaattgcaggtggagaagctcgctgaccgtgaccttgatctgaccatgattttgatggtgccgatgccgtcagcacccaggcctcctgcccttgccatgactggctcctgcagctcacctggctgagaggtgcgctggctcccgcaggctgctaaatagggacctcactggccgccggggctacggcatgcttgcggattgcgtttgcggagggactgaggactgattgtgttgtggggatattagcagagaatcagagggggcatccgaaaggccgagggttcggcggggagaggaggtgggaggctgcttctctattttctggacttttatcgaaagggaacaggggacacatttggggacagtctccttcctggaggaggaagggcttagggtgctggtgtggagtttgcagggatggggataatgagctggagggtgctgggcaggagctggccagtggagggctgacgagggaggccctgctgactgggcctggttttcaagtgagcatcctgagctgcggggaccgaaggggtcttagagacctcggagctgagactcgggaccacagaggggtgggctgtgcgcaggacaacacagcagatggggcagatgtggggggaccaggcttctggcccccacactgcgctccagggcctgtcgtttgcctctggagtggctgacggtcttggtagtgccggctgctgctggagcgaggaccactcgccagtcaggccttgccgggtggcgcggttccccgcatcctgcagaagtggagagggatgctcagaagtgaagatgcctgcccagggctgtcctagcatggtgcgaatacctgagctcaggccaagggcccaggggccttgcaggcttgaggaaactcacctcttgggcatgccttctggactcaggcctggagccattcaggtctggctccgggggtgggacagatggggaaaggtggttcaccaggttgaaccctggctttttgtgaggatggagtaaggtatcctctagaagaactcttgcactgtgaatgcgccctgcagggtccatcccaagtggtccgtaccagccctgagtggcgatgatcacaaggacggtgggcaaaacctgtctctgcccctctttctcctgctgcagaactgtgtcctcccagctcatggctgtcagatcctttagatgcctctgggttccatgggtgccttacgttgtcttccctgtaggacagcagaccctgggggttggctttgatggtattcaccatggggtaccccatgcaagcacagtgctttcacgcccagcctcccagcctgtggagtaggcctgtgtccggccagcctcattttgtggccagaggagggagacagtggttctggagacaggagctagcctggggctgccctgccagccccctgttctcccagctcatctccttgccttgggggtgctggtcaccctccccccggccagctctacccccagctttctcttcctgagccgtgacctgtcagtagggggcagtggaggccttgaaagtccttggagaggactttgaagcagtttttacaactctgtccctggaaagtgtctcctgtcacacccccagcggctccctccctcctaacatttttcctggggttgtcatgcagcggggggtggaggaacccactaggtcacggatggagcagagctgtgttgatacaaaccctggctgaacccacatgctccctacagccagcggctgatccctggaaccagggaagtgacctcatagcaaggacccacggagcagccgtcacgcattcccgatcttggtttctggacccagctctggaaaaggagccagatcccagccccttggagctgcccagggaagaccccggcccagagctggttgacagctcactggaacctttcatctgcttggccaggcgatgccaaggggcagaggttagaagtgctaagaagcaggccgagtgtggtggctcacgcctgtaatcccaacacttcaggaggcgggggcaggtggatcccttaaggtcaggagttcaagaccaggctggtcaacatggtgaaaccccacctctactaaaaatacaaaaattagccgggtgtggtggtgcacgcttgtaatcccagctacttgggaggctgaggcaggagaatctcttgaacctgggaggcagaggctgcagtgagccgagaccatgctactgcactccagcctgggcaacagagcagtactccgtatcaaaaaaaaagaagaagaagaagaagaagaagaagaagaagaactaagaagcatctgtcttcctgattgaaaagcaatctttgctgggtgtggtggctcatgcctataatcccagctttgggaggctgaggtgggagagtcgcttgaggccaggtgttcgagaccagtctgggcaacagaagctccaggtgtagtggcgcttgcctgtcgtccccgctcctcaggaggctcaggtgggaggattgcttgagttaggagttcgaggctgcagtgagctatgaccacaccactatactccggctcctaggtggtaagttgagaccctgtctcaaaaaacaaaacacaaacaaaaaaccagcctttaacttttgtgattttaaaaatcacacctacttgtgacaaaaacattaacttagaaaatgtaaaggaaatgatcaataataattgcatcctccagacaaacactgttagtatgttcgcatttccttcccgtctttttctacatagatactcaatacttactaatttgttttgaactaaagatggttttctctgctttgtatgagaaccacctcagccaggcatgatagttcgcgtctgtaatcccagaaagctaaggcaggcagattgcttgagcccagaagtttgagaccagcctgggcaacatggcgaaattccatctctacaaaaaatacaaaaattaaccgggtgcagtggcacgtgcctgtggtcccagctcctcaggaggctgaggcaggagaatagcttgagcccgggaggtggagtgagccaagatcgcgccactgcactccagcctgggcgatgggagtgaaatgctgtctcaaaaaaaagaaaaaaaaaaaaaaaaagagtgccaccttgccgcctctctcagggattttcatccttttcacttttcgcccaagtcttgccctgtacaaggatgaggtcaaacagccataggagggtggtactggatgttcaaaaaaatgtctcgtggctggcgggacttggaaacacgttggggaggtttcagcagagggtggaccccaactgggggtggggggcagcaggaggacccctcacatgctctctctgcgtgtttcatggggctgcctgtgaggccgtgtgaaccagagcccggctgggaagccacacattacctggactccatgacctttcctggcagcacaactttggccagtacactcaactacgttcccctctgtaaaatggactaatagaaatgcccacttgagagagacgtgatgagaaacaaatgtgttcatagagcaaagtgcttagaacgggcctggcacgacaggagcccacgtgtcactgctgccgttgtcaccgtcatcacagcggccgcggcgttggctactttgattgtttctccctcgtccctgtcaccttgttccctcagcaggctctcattcacttattcatttacagccgaggcccgctctgtgccaggcctggtgctgagaacgggggggcggggggtagatagatgggggctgtgccccactccctgacccgagggttccctttgcaatatgaggttcttgcagaatggacccccaggctgttccaccaacccctcctcagtccagcttaacccttccgtgcccgttttccgtgctgttagaggaggagaggggaggaaggatgggtggagtttttgtgaggactgagcgggcaggggtgtgtgaggctctggaaatggtgcctgcggtactcactcagcgttagcttttgttgtagttgctgttgggagtatattcttggatttcaggacactgacgacggaaggggaacgctttttctggaagccatccagaggggtccaccgtggccgctgggcagagttgctgacttgtgagctgggcctgaccacagtcaccgttctcacgaaggaggccccctgcagtccccctcccaggaatttctgggcccttggcaggggatagttcagggctgggggtgggtggccgtgtccgcaggccctctgcaggagctgattcttggagtcagagaatcccctgtcgctgtggggggtgttctctcccgcccctcccctcctgctgtgctctcagctgctccaacaggatgcttttctgagtgacagaaaccccaactcagaatggcttcagccctcaagagaactgagagcttttttgtgcaaaatgagatgctccgggcattgaggatgctgtggaggcgtctccgttccaccatctccagccgtggtgtccctctcggtcacaggatgctgcagccatgttctagggaaggagagcctcccttcctgtgagccaggaagcccctccgcgcagccccttcactggccattgcctgagacctgacctggtggctcctgccccaaggagcagaaaggggatttgctaggtcagggtggactgggtgcgaggagcaccccccaacagggtctgctcaggtgtccctcctgttggggcagcagggaagggacccacatgtggcactgggacacggagaggcttttgtgcctgtgacagccaaaagggatggcgcccccgccacgttcccacccaacccgaggcccagcatggccacgccggaaatagcagcgtcatcccccgcactgtcttggcccgctttcaagaggccagaggggtagggctggagcgggcgtctgacctctggctggatccagctgcccgtggacaggccgtgagtgagtctgcagaggaagagagatgaggcggccgggaccttcccctgcacctcctgaacccctgttccctgtgagtgagatggggagtgcactgctgccctctcttcctgggtatcccccgcctacccgccccaggtgcttgatgttgcctgttcgttttccctctctgcccctcccgccagcctttcccatatggtcctgattaggaccttccgcccgcccgttggtggacaggcagagaggggagcttgctgtggggcctcccccgatggggggacttcccagcacagagttttctggcctccgcagagacgctgtgtgtgcctgtgtgtgtctggtgtgttagaagtgctaagctgcagctgttctgtacatttttcacgtttctcacttgtcagaggccctgggtttggtgtttgtgggctggcgatctgtgttggggtctccaggaggcccgtggtgggagaggcagggccccttctccttcagtctgggcagccttgctctggcctgctgtctgtggaaagtgcgttaggatatggtggcaagactggctggggctctggctccaggcccggccccagcgcgtgtcagacttaccctccttgtgcctccgttcaccctgtctgcctgcagggcctgcagaagcatcctgagagttggtagggtggcctgcctggtgcccgcacggggtctgctggtgggttgctgaggctgcggtggggtctccatggctccctcgtcctgcacatccatcctttggtgtgttatcttgctagcatgtgagctcatactggctctgagtctgcagcctgttttcctcaccaggtggctaagcagagtggcaggcagggtggcagagccccactggcctgcaggggaccctctgtgggctgcaggcagtccccttgtggttccaggtgccctggcaggaccttcaccatgatccccgtcgaagctcacatccaaggcatttgtgggcacccctgccccagacatgagggttggcatttgctcttgcacgtgaagcaaaggcctgtttggaggagggcgtggaagcctggtgtgatgaagacaaggaccggtggcccacccctcttgcaccaggaccttgggtggcaggcctggggccttcagtccttaattcaggagggtaacccgtcactggaactacgagtgaactccagctgttgttgccatagctggagggaagaggggaaaggaggggctgcaggggagcagaggcgctcaccctccctctgccggcatcaggctgccagtgctggacagggccccgtcaactgtgtgaggagtaagtatccttacctggagtaaatatcccctttaatcctcccaccaactctgaaattgattctgttgttattcccatttcaccgatgaggaacccatggcccagagatgttaagtaacctgcccaagcctccctgtgagtatggcagagggagggtctgaattcggaaagtctggctcccgtgcccccatccctaaccactgtcatttacctcttgggccagccctctgattggaaaacctgaggcccagagaagtgcagtgacttggccagttccgcatggcaggttagtggcagagctgagctgtgtctcccatgctctgattctgtggcctcttgaggtggctcacccctaaacacgccccacgtggtggctctgtttcctcctgtcctctgaacctgccagcctgtgctcaggcagggagaagtggagcaactatgccgggcgggtcgtcgtgccccagtgccacctgccctacgcctgattggcagcagagtggcccctccttggggtggtctggaggtgccagtggccactcatccgcacagcccagtctcacacgtgtcactcccaaaggatgttgacacagaatgaagcagctaggggaggcggacacttttgcacgaaggtggcgttcctggtaatctgtcgtgctgtcgtctgtggctgcctttggctggcatctcacctcctcctggctgtcctgcagccaccttagggaggtcagcgtgtcaccttcatccaggtacagcacaagcttgccagcaccgcactgcaggatctggaggcctttgctcctgagccctgcctctgtgtaatccgtaaagcacggacctcttaggggcttccgttcttccacctggaaaaatcttacactgtttagggcttgacgcagggctagagcgtggaggcgttgccggaggaccgagggagaactgagtgcatgttctcttggcctcagccccgtgtgcatgttatacgtgggtgctttgctgtccacactgggttccacggctgggcgggagttgagttcagctcggtggctgcctttccaccctgcaggcctggttcgggagtgtgaggatgcttgctggaagccgatgtgcatgaaagagttaatggtggatcccgtttcctcggccccctctccagctttcccagggaaagggcaggaacagagaggccttatcttcagaggaaggggtgggcggggacacagcgctcttctgcacaggcgcctctgagccaccctgcatgtttcattccaccgacttctgcagcccagctgttcagggcggatccagaaggtggagagaggatttccaataagcagagaatggagtgaatgtgagattcattactgggatttggcaaagcaaagagcctcactttctccccgcagatgggacgggggcggggcaggagccagcggggtgggggtgtccagcaagagctccttcccatcctcccactgctagagcgcctaggcctgcttcctttgccatgggccccctcctccacgcagaacctcagcctggaatgatcacatgtccagcttttctcacccccttcctgccttgctggagggagtggcctggccccggcccctgccccctgccacctacacctcctgttttgctgcactggcctcttggtgggggctgcagcggagatgggcaaaagccgcttccaggcagccaacccccatcctgggagtgactgaaagtccttgagggctcctgcagggtgagctgaccatcctggccctggtaaggacacccaggagagggccagggtggctctttttggggcacagcataaagaacaagcctaagtgtttctgaggcaggagggtgccgaagcattggggagctgggttttagaagcactgtttggggtggtgagtggaacatgcaggacacagattcacgcgatcgtgcacatcacctgacctcactccctcggtttacagaggaggaaactagaggccgaaagagatgaagtgagttccctagggtcacacaggccagcgaggcccagggcgcagacctcctgctctgcttccccgtgcccattcggttggcatccgcatccctgccttgacacccccgtgtggcagctgctgtgattctgtgactcagcacctcctcaccccaccccagggggccctgcgagggaaacgagaacgccccatgcagaagtggttggaaagcaagaagcctggagagaagtgaggcctctgtgctttggcctgagtccaggactcatggcctggttcccagggatggagcactgacccctcccttctacacccccaccccacgcccccaggagctccctgtggggaagcctgaatgacctgggctcagagattgtgaattcatcttgctgggtgtgtggctgcctttatgtaaccagcgctctcacggaggagccagggcacggctctcaatactctcgggggtccctcggtgaggtgggaggacctcgggaggtcaggaggctgctcaagacctctgcccatcagggaccaggtgagggcttgttgaccactgtggcctcctgatgcttctggtggggagaccacagaggggcctgccgccaccatcgccagtggccctggcctgccctgtcgtccttctgggctggccaaactccatgtgcagaaacccaagtgaaccccagtagtggcctctgggagaatcatctgtcaagagccaaggatggagtttctggggaggactttctgctgccccccaacccctttcgggtgcattgtcctgtggccccactccctgtagggaagtcaggtgcctccagaagcttctccctggccccaggccagaggcgacagtgggggccccttgcttgcactggtgactgtggctggttgttggtgcctggccctgccctgcactgtgcacccatcgaaggcggcatcatcctggcctctctggtggctgtgcatgggtgagcagcctacgacatatctgctcccagcatcgtgtggggcggggctttcagaggggctgggggctttcagaggggcagggggtgctcctggccttgtgaccaaaaggagctgaaggtttggagaagctgttgggctgaggtcagttcttataagatttggcgatgagggaacagatgctcacggagctgctcctgtgccaggcgctgctccaggcgctgcacacactgcctcactctgcgctgacagccaagaggctggctcccccacattttacagataatgtgctcccccagttccttagtggtggagccaggattcgaacccacgcaggcagcctcctgggcctgtagtcctacccttcatctccctccaggacctggatcttggggttggcaggataatgacttccagaggtatgcacctcctaatccccagcacctgggactatgttaggtgacatggcggggccaggtaaggttgctaatcagctggtcttaaaataggaagatgatcctggataatccatacgggcccgctgtcaacacaagagtttttaaaagcgcaatagaccatccgagtggtgcagcgggagaggcttggaaggaggaaggaggccacaaatgtgggcggggagaaaatgcaggaaaacacagtctccctgagcctcgggagggtgcccagccctgtggacaccttccctggatcctagtgaggtggagggtgggacagatgtgtgttgtttgacatcacaagtgtgtggtcatttgctacagcagtgatgggaattgaatgctgttaggcagcagtgctcctatcccggaagaattaggagaaattcccctgtggatctcaaactctggaagattctgggctcctctctggactgctccagctctgcaatcataggaaaggtctcccatgtctgtttgggggaagaaaaccccatagcaaaaccatttccccttttgacaaatgaaggcgagggtgtgggctggacacatgtttcctttttgtggatttttttttgttttaacacttagaattctgtagctgagggagactttgggggtttgtctgcctgatttgcaagtgaggaaatggaggcccagggaagttaagtgactggcccagggtcatgcagagtcatgctggaatatcaagtcagatagcccagctcctgttccaaagtgctttcctccctggttggggaggagagttggagagagtggaccctgagcaacagcatcattggcagggactggaagagtagctactgtacccaagtgctggggcctctggccacttcctgcaggaaccaggtgacccgccacagcacaggcctctccctgtctgcctgcagccctgggggccccagggacctgaggacactctggcctgagggctggggcctgagagaagaggtagaagtccctctagtctggcctgccctcccggtgtcctgcaggcgtctccggcagcccagggctcctagcgaccttggctggcgggcgtccccacctttccccagccgcaccctgtggccagcagcttgcaggacttgggcttttgcctgtgaccctgaaacagtcattttctgagctgagtggggatcaggtgagcagatccccacacctgtaactgctgtgatctttctgtcctggaggctggtgggcagcctggatggtgcttcatggcactttatgactgtccccgtcaccaggcttgtgagttgcccccctcctctcggcatcctgaacagcttccctgagagccccactccgggccttcgcctctgtaggcccgctgcctggggcgcctccttcccctggaagctgggcctctttggggactccttaataagggccttgccaagtgctgccaaattgccccatctggtcaccatttgttccacttaccaccctattttaacttttatgtctcctccttgggtttaagatctgagcaggcagggtctgtgtggcaccccaggtccctgatgccgccagcacccgggggactcttagtacatatgcagggagggaaggaatgaaggaggagatgacttgggaagtcctccagttcctgtttgtaactggcatattgcgacaaaacactcacggcatttcacttttttcatatacctttttaaaaaatttattttatttttatttttatttttattttttttttgagacggagtctcgctctgtcgcctgggctggagtgcagtggccggatctcagctctctgcaagctccgcctcccgggtttacgccattctcctgcctcagcctcccgagtaactgggactacaggtgcccgccacctcacccagctaatttttttttttttgtattttttaggagagacggggtttcactgtgttagccaggatggtctcgatctcctgacctcgtgatccgcccgtctcggtctcccaaagtgctgggattacaggcttgagccaccgcgcccggcctgtttttatttttttgagatggagcctcgctctgtcacctaggctggagtgcagtagcacgagcttggctcactgtaacctccatctcccaggttcaagcgattctcctgcctcagcatcctaagtagctgagattataggcacccgccaccacgcccggcgaatttttgtattttgagtagagacagggtttcaccaagttggccaggctggtctcgaactcccgacttcaggtgatccacctgccttcgcctcccagagtgctgggattataggagtgagccactgcacctggccttcatatacctataaaagagaacttgcctgggaaatcttccagatgcacctttagggttttaaggcacagatacatgaagctcgtcagtgagcagctgctgcttattcctttttcacttccaactcagagcagtccgcatcccaagcggacagctgctcccttcctctcggctccctgccgccgacgctcccgcagaagcagggagaagaggcaggaaggcgacgcgtgatcgtccgctgggcgcccgcacggtgccgtctgcacaggtgccatctcctttacttgccactctcctcggtgagccctttcccctttttgcagatgagagcattgccccctagaggttaagaaatgggcccagagtcactcagctcatcagggtgcagccagatttgaaccccaccctgctgatctcctcgcctgcaggcctggcccgatgagatggacagctgggtggtggagaccttgagaccctggatggctcccaaatagggcctgtaactcctggacggggagagtttggcacaaagggtttgtggagtgagctgggggagaaggtggcttagggtccctgtctcttttttttttttttttttgagacggagtctcgctctgtcgcccaggctggaatgcagtggccggatctcagctcactgcaagctctgactcccgggtttacgccattctcctgcctcagcctcctgagtagctgggactacaggcacccgccacctcgcccggctagttttttttttaatagagatggggtttcaccgtattagccaggatggtctcaatctcctgacctcgtgatccgcccgtctcggcctcccaaagtgctgggattccaggcttgagccaccgcgccccgcaggtccctgtctctgaacaaacagatggaggtgctattccagcatcctctcagcctctggtgtcctgagcttctggttctgggaggagagaatggagctgggctccgttctgggctgggctggtttgggcccaattcagacaagcttcttagtttgccatgagcgatgctttcgcctgccccagtgtctccgccaaaaacatgaagggcttcagaccccccgaccccggcctgcttccctcctggacttggagtgggtctggggctgacagcagtctcttgccggatagcctgagcagccaccaacgccatcaggtctgacggtgaggcccctgcccccgaggaaaaaacaaggccgtctgggggattttctgccaggtggtgaaaacaggcctggagtcagccagcacccccatgcttagacacttcgtgtggttttcaaagtgcttttatgttgctagctcatacaatcttccccaaaacccaataagggagggcaggaagtttgagcaacagcctctcaagcacccaaacagcaggtggtttcattgccctccatttacaggcaactaaactgaggtccaggatggctagcacttgtctccccagccacccagccatttagccgcagaaaaggtcatgactctttatgccccagcgaagctgaagatttttctttctgtttttaaaaatgtttactacccagggcggtgaacacctggtgcctctgtctagcccaagatgtgaacatttgccactcccatttctttcctcccacaagacctgaccctccttttgtgatgggaacatcctgcaggcaggctgtcctgctttcatagactttgagaaacggggtccaaattgctggctgtgggtgggaaaggcgacactgcggtgaagagggggagtatttttgtaggtgggaagaaatgcatttcctctgccctcttaggttcagtgtttgggggcctgcgaattaaactcactgaagataaattaacgatagaaaagacagatttaatcacctaggtatgggagttcactgaaaaatgtgactcaaaagagcacgtagaaggtggggccgtggctggtccgaaggtggtgagttatctctgctgattgttcagttacagattagattctttgttccactctttcccctcttcccactagtgcacttgactagtgttttttttgagccggagtctcacgctgttgcctgggctggagtgcagtggcgtggtcttggctcactgcaacctccgcctcccgggttcaagcgattcccctgcctcagcctcccgagtagctgggactacaggtgcctgccaccacgcctggctaattttttgtatttttagtagagatgggtttcactatgttggccaggttggtctcgaactcctgacctcgtgatctgcccacctcggcctcccaaagtgctgggattataggcataagccactgtgcccagccaactagtttttnnnnnnnnnnnnnnnnnnnnnnnnnnnnnnnnnnnnnnnnnnnnnnnnnnnnnnnnnnnnnnnnnnnnnnnnnnnnnnnnnnnnnnnnnnnnnnnnnnnnnnnnnnnnnnnnnnnnnnnnnnnnnnnnnnnnnnnnnnnnnnnnnnnnnnnnnnnnnnnnnnnnnnnnnnnnnnnnnnnnnnnnnnnnnnnnnnnnnnnnnnnnnnnnnnnnnnnnnnnnnnnnnnnnnnnnnnnnnnnnnnnnnnnnnnnnnnnnnnnnnnnnnnnnnnnnnnnnnnnnnnnnnnnnnnnnnnnnnnnnnnnnnnnnnnnnnnnnnnnnnnnnnnnnnnnnnnnnnnnnnnnnnnnnnnnnnnnnnnnnnnnnnnnnnnnnnnnnnnnnnnnnnnnnnnnnnnnnnnnnnnnnnnnnnnnnnnnnnnnnnnnnnnnnnnnnnnnnnnnnnnnnnnnnnnnnnnnnnnnnnnnnnnnnnnnnnnnnnnnnnnnnnnnnnnnnnnnnnnnnnnnnnnnnnnnnnnnnnnnnnnnnnnnnnnnnnnnnnnnnnnnnnnnnnnnnnnnnnnnnnnnnnnnnnnnnnnnnnnnnnnnnnnnnnnnnnnnnnnnnnnnnnnnnnnnnnnnnnnnnnnnnnnnnnnnnnnnnnnnnnnnnnnnnnnnnnnnnnnnnnnnnnnnnnnnnnnnnnnnnnnnnnnnnnnnnnnnnnnnnnttaactttgggcatgtataccatcttaataggggaaaaggaaggggcaaaagcacgtattatgggccaggcgtgatggctcacacctgtaatcccagcactttgggaggccgaggtggtcggatcacctgaggtcaggagttccagaccagcctggccaacatggtgaaaccctgtctctactaaaaatacaaaaattacccaggcgtggtggcgcacacctgtaatcccagctacttgggaggctgaggcaggagaatcgcttgaacctgtgaggcagaggttgcagtgagccaagatcgcaccactgcactccagcctgggcaacagagtgagactctgtctcaaaaaaaaaaaaaaaaaaaaaaaaaaaagcacatattatggcaaaacaaatgagtttttggaaagataaataggcccttaggagctgagatgcgagatgtgaagtcttgtgacaatgtctgcttaggtgtggtgtggaaactactcacatctcccagggaagggtccgttgctcccagggagcagatttgggcccgtataccatcttaataggggaaaaggcacatattatgggccaggcacaatgtgcccggtgcaggaggcagacgtggtttatggttgctgttggaaccagtgcagggcccgattgctttgtattgggtgttgaggatcctggttttgtatcagccatgagtttgcagctctaggacacacctgatgtgagctcaaggggaaaggaggttggaggggcagagtggttggattggatgtgtgcctggggccatatctaatctacaaagtggtcatcaacgggaccagctggctgcagaccacaatcaacgctattatttaaaagtaaggtcacacttttaataataagtcacattttaagttatgatcaatttataagacacactgttggtataatgatagcttttcaagaaggatacaaaaaggcacattgggccgggtgtggtgactcacgcctgtaatcccagcactttgagaggccgaggtcagcggatcgcttcaagccaggagtttgagaccagcctggccaacatggtgaaaccctgtctctgctaaaaatacaaaaaaaaattaactgggcatgatggcgcatgcttgtaatctcagctatgggggaggctgaggcaggagaatcacttaaaacctgggaggtggaggttgcagtgagcctagattgcgccacttcactccagcctgggcaacagagccagattccatctcaaaaagaaaagaaaaaaagtaaaaaggcatgttgtaggtacctgctagtggaagttgcagcttgacaggaggtagggcgagcacttcttagaaaggaggaaatgggccctcctgctacagagacccacaaacatagactgaggcctgccgcacaggagactcaaaagaggcaaaggtgaattagagtcagggtctccaagtcagggtctgactctgggggtgggggtcacatattatggaggatgtcaggagggcttcctggaggtggtgacgtttaccgggcgggttttaggtgggttttgcgagacagtacggcctggctgaagagtgtaggctccttagacaggagggggaattcaggcttgaaagtgagttggtcagattgccggggtccttgaatgcaagggaagaatttcgactaacagaggaacctgggaagctgtttgggaaaaggagtgatgaagtgggaggggtcatccagcagagccctgccttggtgggaggtagcgagatgggaggtgggcattggtgagggacgatcccagtggtccaggggagcagtcatagggtggaaactaaccttgtgggtctgggcaggaggggactgatttgagaccccgggaagaaacagccagtaggactttggtgagagggccgggggtcggggagggnnnnnnnnnnnnnnnnnnnnnnnnnnnnnnnnnnnnnnnnnnnnnnnnnnnnnnnnnnnnnnnnnnnnnnnnnnnnnnnnnnnnnnnnnnnnnnnnnnnngtcggggaggggggtgcggggagtgggagcttgagtcttcggaaacgggcagtgttccaaggggtagacctgaggcaagatgtggagaggcagctgagctgggaagctggaacggaggtgtggtcaccccaggagactaagtcggggggtgaggggacccctgggagccatccagcccccaggactagggaatacggaggggagaagaaccggctcctgcgtgtcaggcactgccctggaggtcagatggggcggggctggatactggccatgaggattttttcaagaactccgttaatagtgagatgggcggacaccagatggcgcgggttaagaagtgagtgggcagtaggaagctagaagctgcagtgtagacccactttgagaggttgggctcttcagaccgggagaaagttcacagttttgaggagttaggtaggtcaaaggaagagggtttgcttgtttttgagattggaacatcctgaacgttctcccaggccaagtgaggagaaaccagaagaaggaacatggcccccgaatgtgccaaaacagcccagcagctgcgctgcctcacagagaaactgtgcagaggcccctctgtcccaccatgcctgcctggggacggccttcactcgggctactcagggttcccccagtctgtccacccaagggcggcaggggctgtgggtgctcccagccccttttggaggtcggtctgtgggtaggaatgtgggctgccttggggcgtcacggctgcaggtgcataccagccatcagaacaaccctcctgctccccagcccgcccccctgcacccccatgaagaaacgcggccaccggcccacagagagggagggatattgttcttggcatttgatgggaagcatctgctgcatcccactggggtgttgcccaggatggattggaaaagagttggcaggaaggctgagctctgtgctcacaacctggcttggcggtagccgaggagcttggcaggggcagagtacaggacctgggaactgcgggctggtgcatgtgtgcatgcacgtgtgtgtgtgtatctgtatgcacatgtgtgtgctggggggtggggaggaagctgagaaaccacatcccctcctcgttgctgctgtgttgctgcgtgcttcagcagcacgtgggtgtcactacacttcctggcaggtgtcagcctccaagactgtgctgggctcttctcccagttggctcagttggaggtgggagtcccaactgtcccctgtggcttccagagtgggaccttgctgcgggataggctggccagtgctgctccctcccccgtgacccttctgttgggtgggtcaccaggaaggactgtgggcattgcccacagacaggtggacatgtggcaaggacaccttggggccttctttctgatgcccctcgaagggggcactttgtcagctttgagatgagtctctgtggatgtgggaagctcactatctgaagagcagcagccttcgaaaattcaacacagacccccgagtgggggcgggaaggggtcctgtcccactcactggctgcctggcagagttcagctcagctctcagtgtgtgtttcttcatctgcacgaggaaacgcctgtgttgctgtgggcggaggaatggactgagggctacattcgcttcctgttgccactgtaactgcttcgcacaaactcagtggcttaaagcaacagacacttcttcctttacagtgttaagggtcagaagccggagatcagtctcaccagactaaagtcaaggtgctggcagaattcattcctgcctcttccagctttgggcgggaggcgctgctggagttccttggcttgcggctgcatccctccagcctctgcctccatcctcatacagcctcctccttctctgcagtgagatctccctctgcctccctctttttttttttttttcagatggagtctcactctgtcacccaggctggagtgcggtggcacgatcttggctcactgcagcctccacatcccgggttcaagcgattctcctgcctcagcttcccaagtagctgggattacaggcgtgtgccactacacctggctaatttttgtatttttagtagagacagggttttgccatgttggccaggctggtctggaattcctgacctcaggtgatctgcctgtctcagcctcccaaagtgctgggattgcagccatgagccattgcacctggcctgcctccctcttaaaggacgcttgtgatttggggtccgcctgggtaatcttttcatctcaacatcttcagttacatctacagagtccctgttgccacataaggtaacacagtttggggagggagagttattcagcctaccctgggggcttgtggtgtatctcagggtccttttgattttaagatataaagcaagaaaacaaatttgttcaaggggaaaaaaaggacgtgttgaattctgttggtttaaatgtatatttttttattgtgctaaaatacacagaacataaaatgtgccattagtaacaccgagtacatacacagtgttgtgcaaccatcaccactatctagtgccagaactttttcatcaccccaaaagaaaaccgcgtatctatgaaggactcaccccccatctgccctctccagcccttggcagccaccagaatgctttatgtctctatacattcatttttaataagtgcaattctgtgtgactttaaaataaataaacatgagcacgatgagttgcttattggaaggatgtccatgcgggcaggccggcgtgtggaatgcctaggcctccggaagggcaggagttaaaggggtgtggatgtgctgccctctcctccccttgctccttccttggggtcactgcctcttatgcctctttgcaaatggctccaaatagtgtctcagcccccatgtctgcattgcctcctagcttcagaaccctccaccaaaaaacactccaagcttcagactcactcctgggaaaattccaatggcctcactctcccttttgagccagccaggccccacggcctgtggcaggctgtctttgagtcgggtatgtcccggcctgagcacctatgagctagggaagcaggacaggcacacccagggaaggggaagagtcggcagtcacagtaatttatatctttggaatcgtctaagagatacttagcgtgtgcctagaactttcatttcttttttgtttgtttgttttttgagacgaagtctcgctcttttgcccagactggagtgcagtggcgcaatctcatctcaccgcaacctcctcctcccgggttcaagcgattctcctgcctcaacctcctgagtggctgggactacaggcgcgcaccaccacgcctggctaatttttgtatttttagtagagatggggtttcaccattttggtcaggctggtcttgaactcctgacctccggcgatccacctgcctcggcctcccaaagtgctgggattacaggtgtgagccaacacacccaaccacattcatttcttaggagaagctctgcattttctgacagcgaaatgttcccaggcgggtgacactgatggcgggatctatggcctcaccagtgtcttacggaagatgctgctgtgtgtttcaccaagctgtgtcctatcgtcctctaaacgtggcttgtagacatggtgctgagaatgatctgggaggctcaaatcataatatggtccaaatcaacagctctctgatgacctggtattatcctaggatcaaattgagactatctgaggatgggtgtggtgactcacgcctgtaatcccagcacttcaggaggccaaggcaggcagatcagttgaagtcagcagtttgagaccagcctggccaacatggtgaaatcccatttctactaaaaatacaaaaagcagccggacatggtggtgtgcgcctgttgtcccagctacttaggctgaggccggagaattgcttgaactcgggagacggaggttgcagtgagcccagaacgcaccattgctttccagcctgggcaacagagcaagactctgtacccgccccaccaccaaaaaaaaaaaaaaaaaaaagagatgatccgagctgcactgtccaacatgatagccgctggctgcacggggccattgaacacctgaaatgtggcaactccaaatggagaggtgccgtgtcctagcaagggggatagaaaagaatgtcaaatatctgtcatttttacattgattacatgttgaattgataatattttgggctctgttaagtgaatgataaaattaatatcacctgctgttacatttttttaatgattttttttttttttttaaatacggggtctcacactgttgcccaggctggagtgcagtggcacaatctcggctcactgaaacctttgcctcccgggttcgagcgattctcctgcgtcagcctcccgagtagctgggattacaggtggccgccaccacgcctggctaacttttctattttcggtagagacagggttttgccatgttggccaggctgctttcaaattcctgacctcaggtgatccacccgcctcagcttcccaaagtgctggcatttacaggcgtgagccactgtgcctggcttgttcttacatttgttattgtggctgctggaaaacgtaaggttgcgtctgtggcccgtgtgccatttctgctggagggttggaccgaggggcagccgggaaggctttggggctactctacctgagtgccgagtgtgtgctgagtggtggagaactttgagagatcctgaaggacagaggctctgtgtgggggatgcagcccctggccggagatgccctctctgtgctctggagaccctcatttggtgacagcaagaggaaccactgccagaggggcggccacctcagcaaagcaccgcggctgctggccgcccaggtcaggaatccagaggcagaggaggggagaaggctgggcttggaggagagcagggtcgtgggccctgggaaaagcctggaggggccagaaagctgggggatagattgaggccagaggcaaagagaaggaggttcggagaggaaggctaaggaagaaaggttctgcccacggggagggaggaggctgacggggtaggggcatggtggaagctgaatcctcgaggcttgctgttgaccctgacacctggccagaaaggagttccttccagcatcctttgtcaatggtttctggagctgcccttaaggggccagtgacgagggtgccgtgggatgggctgcgggcagtggaaaagaggctcttctcactcccactgctggggaaatcagcttcttggaggaagggggagccgtattttctgagtggccgcacttcctggcctggacacgtgtgtcttgctgtaattttggcgactggtgttggtggtacccattttatggatggggaaggtcagattccacagatgttgagtgacgagcccagggccttggatttcagtgtttgactcagaacccacgtctctgatctgccaccagcctccctcccattcagatgggaacagggactccgggcatgcagtcccctcccagacactcccccggctctggcctggcgcccagagaccagtggtagcagctcccattcactgtgaggtggggaggtccgtgggaccaggaggccttagggggaaagttggccatgaggagtgggaagtgatgggttagatgccagtgactgctggctggggagccgctggacgtggctggcctgtgtggccagtgtggcgggtgccccggggcttcagtcacccccagccacaggtgggggtgtgggaaggtgaaagtgtgtggaacccagtgaccatgaggtcctgtaggggctgcctgagagagcgtagcctccagaattcagaccctggccctcagaaggtgtcaccaaaggcttctttccacttaagcgaatccctcccagcccccagcaagccctcggaaccagcccactcccaggcgctctctcctagtgtgggagtggccacgcccctgctgggagtgactcacttgggttcagaggtcgtggcactgagatgggtctggcagatcccagcgtccaggcccagcccctatagtgtcagctccctcctctggggacccccttgcttgtgcccctctgggtcccagcacatcccaggcctgcagggagggggagaggaagagtgactcactggccaggtcccccaggggctggagaggctggagaggcaggagctggatcggatctgaatccagaggctctcggaagaagagctcagggtgagctgcgcccccatcccctgcccctcctctcctgctccttctcccttccgtggtcccagccagcaagcacctggggtagaggggacaaacccaggtggctgtgttccaaccctgcctgcaggtctgaatggctttctggagtggctggccatgccccctgagagcccagctgtggggatgtctgagcaggttggtgggggagcacctgggaagcaggggcattgggcagagcacagggtgagagggcgtccaggtcaggttcaggacctggttgggaggagggggctcctcatgggcactgcctctggcaggctcagggacaagggcagggacagtgtggctggaggtccctaggagcctcttcccctctcttcctagcagctccccctcgctcttcccagggaccctgtcactctcctttagcgagtcgcagctccttggcgtccctcccatgcctccaagttgctgctgcaccgggcctgccgctgggctcccctatctctgcctgccccctcctcctgctcccctcgccctgcccccttggagcaattccccaccgagcctcccttcccaggcagtcgaggtccctccctacctctgccccacgctctgggaggctccttgttccgcggccacaaagcccctttgatcctctgctcggctccgagccatgtgacccggtgggcgggccgcggctctcggcgcgtccagcgcagcccgacgttccgctgctggggtgagtcctgctcctttgttcttcccagccttgcaccactggctcgggggctctcaggtggcgcggccgtgaggcgggccccgatggccctggtggcggggccgggagccacgctgtccctgggccccaacccgaggccggcaggaccgagcggggtccccaggagaggggtggcggggagctcggtctccacgcggggaccagattttcagcctcaaaatagaagaatagggctttgtgtggtcacagctatctctttgtaaatatttggccaactaagctgagtggctgagtctcctcctgccgggagcttcttggaacatgtttccttttcgcaaggggtttccctggcttccaggagggccaggaagaaattcgaattggccaccactttctctaaaatcactccgctcaagttatcacccctttgggctcctgaagaccggctggctggaggctggagatagtctcaaccctcgaaatgcagtaacccaagctccccgcagcgccggcactgggatccagggaactgctgctacagcccagctctggattcctggatgtgttggagatgtgcagggtgttcctgggaggagcggggagggaggctgctgctggcggggctggtctgcgtgtgctttgcttctctacaatggcatgtggggtgtcgccatgcagagtcatgtcagtgagcaggggctgagggaactccctaacggacctgctttcagaggggtttttcatgctgggagaaccccagagactaaagtcatgcagccaacagagggtggtccctggcatcaaagcagggagggggccaggagctttgcaggcaatgccatctgctcctgaaacgccttcccagtgactctggggactgactcagcctccagcctgctgcacttcatccctggcccctctctctttgctttttgacatgaaatctgctgtgttttggtcagaggtttggggaacagctctctgctcatctgagataagtttgtaattcccggagaaaaatgtgccacccggaaggaggctgagcagtagttttctgacaggtctgttctgggctttggggacagcacctgctggatcaggaccgagttggaatttggtttggatcccatatgagaaaacctgttagaagaggaggaagcagaaaaaggccccattccctaataatggtgtgggttttcctcctccattcattgccaccttgccttgaaactaacggggcctcgtgtgtttccgtgaatgtcattctctttggccaactcccctggcagccccaggagctcctttgcaggaaaagtaagaaggtgtttgctgagcatctagcatacgagtcctcgttggaaaggtgggattcttgcttttccttcttgggtctcttttaggctgagatgtggccaaggaaggcctgtggtatggctcgccttttttaacacctgtctctggagacctgagttgccgtggacccccggcttgctcctcctgtcctctggtcatttctgtgtcggggtgtctgagaaactattgcatcggccgctttgtgtatgttcccaccagcccccgcccctgtaggctgtcattgtgatggggccgattcagctgcggtggggaggacccactgtgcgcacatggggggtggcgtggggcattctgggatgagaagatgcaacttctgccctgagagccctgttttaatggaaggcgggggcatagttgcaggtggaagccatggaacgctggtcagaccagcattccatgtcaaaaatggccttgtcagccaggcgcagtggctcatgcctgtaatcccaacacttcaggaggccaaggcaggcagatcacctgaggtcaagagttcgagaccagcctgtacaacatagtgaaaccgtgtgtcttctgaaaatactggctaatccgggcatggtggcacgtgcctgtaatcacagctactcaggaggctgaggcaggagaatcacttgaacctgggaggtggagattgcagtgagctgagattgtgctactgcactccagcctgggcaacaagagtgaaactccatctcaaaaaaaaaaaaaaaaaggccttatctgggcctgggatctgtcctccgaacactgggtccactgtgctccacaaggttctgggctttcaccccggaagccctagacccacttggctaaccagagtctctgggttgaccactccccagccctggccagcctcctgggccaccatattctcacaacttcctgttgtgccacagctggtccgagctgctgttatcagacaatgcgaggcacttccacaggaggggaccaccctgtccttaggagccccttctccctgtccccaggcctggtgcagtgtgcggcttcccttctggtgtcaaaggtctcaaggtccctttaagaagcctgtcaccactgccagcagcttccgttatctggttcctctgtacatgtaagcctttcccatacaccccggatgtttagggcttccgccctctctccctggccgagggtgtgggaagagggctttatttcaatgcttgagagtagggtcaatggccggggtgagctgtgggggctcctccccgccggcccctctctgcagccctcacctggacatagggcattgaaaccacctgggctttgggaagaccctggaggctcccagcttcccacggccactctttggggaagaggcttcctgagggacttggaagggactgtggcccttggctgggactctagtcccagagttctgccttccagcgccgagctttgatttgtttgttgagtgccagcccggttcccggacaggtagggacctgttcccaagctcagcagagccttgggaagctttcccagggggttcccgagggtggcggccatgcccggtctgctgtacgtgtgattttgtttgatgaggaattggctgggaaggcgcaggtctaattacaggcccatgagggtccctctcgcccccacccaggaagcggcggagatcctggcacactcagcacccaggcctgtgcctgcccagctggcggcggaatcatgggagccttgctccagggcctgtggagcagcagtgggaaccttccccacctcagcccctcccagggctggctgttcaaactcgccgcagctcagcctcttcctcctctctttcatcaaccctgggaatcgcccactgcccactgggctcggagggggtgcaggaagagagagcttaacacccagaggcccaggccttctgcaggtgcctgagctgccgtggcctgatctgggttccctgctcgaaccatcacagtagagttaatgatctgcctgcacgagttgcttcatcccagctgactccggggctggttttggctggtttcgtggggaggggctgggccttggttttgagggagttgggggagtcagtgcaaagggcctgaaaagtggcagaggtgatggcccatctaccctcccccggccagccaggctaaatgcgatttactttctttctttctttcttttcttcccttctccctgtaaataacactaaatgcgatttgtcaatgcattcatttgggttcagtagttggatcatgggcagaagcactccagatctgtcactagcctgaagctaggggtgggggacaccctctgtgagatcccagctcctgagtgcccaaggctgctcttggaaccccagctctgggtccgtgtcaggggactgatgttgatggagttgctgacattgacccccggcctctgcatggccttcgggaaggaggcccttcgctctctgtcccatcgagcctggcgggcagcactcccttctcaggcctgtgcccctggcagggcctgccacccccgccctgctctgtgggtgccaggctctgagcatcaggtgactcggtcatctgaacggtcactgaacagtcgtccttgctggtgtccccagtggaatgtgcatggacgtcctccctcccccagatccttgtctcttatctctcagcctttgttgcaggggccaccacaggaccaggagatacgcggacgtgggtggcatgtccactgggcagattcggccctgaacctgcacgccgcctccaagggggtccccagtgggtggggttgatggtgccatctctctctctctctcactagaactgacatgaggattgtgtcttatcgatccacgtcctgagttcccggacgtcataggtgcttgctcaacaagtgtttgaatgaatggtcagcattgtgtgactgcagattttcaacttttatccaaatattttgtggtttctgtgaggctagcccgagagtctcacaagaatctccattctccctgcgctctccgcacaaggtctccttggaggatttttcagaaaaagggccaaagagcagcatttcctcagggattggaacacgctctccccctgccctgggggaagaagattcccagccccacttcccatgtgccacgtgactaggagggtcttggggcaggatggcgtcttttgtgccttgtgtgctggggcctgaggaagcgctgcccatggcgggtgtcatctgccggccctgaagactaatgatgggctggacagtggccccattgagtgggagggagaattgctgctgtctgtagctggggggccgggcgggtgggagccgaggctgggcagaacagtgcagacctggcacggagaggcctggaggaggagcaggggttctcagccacccaggagcaggagtgtgcatcctcctgcggattctccgcctcttggcttcgttacctgcaccaggctttgtggtgaaagggcacagagtggaggaaggtgccacggccagggcaggccacacgctctgctaatggactactgttactcgttgcttctgtggttttgctgtcaggatcctccagcaccaggtccccaccgccagggataggccccagaggcagtactgactccccgaagccagggacagaccccatagacaatactgggtccctgcagccagggatgggcccccacggccagtaccagatctcagggaccagcactgggtacccacagcctgggatgggccccatggccagtactaggtctcagggaccagtgctgggttcccatagccaaggacaggtccccatggccgataccagatctcagtgaccagcaccaggtccccaccaccagggatgggcctcacaggcagtaccaggtccccaccaccagggatgggcacccatgaccagtaccaggtctcagtgaccagcgctgggcccctggatgactgaaggcgggcacggctgactaacgctgcaggagccagcctggccatcctgaggcactaaaccatcactgaggtctcaggggactcagactcctcagcttgtcctcttgaattctggaatcagacacacctgggttcagcctttcccccagggctgtgtgccttggatggttgcctcacctccctgaagctcagtgatatggggaccgctgcacagggcctggcacagatggtacttggtagcacagggtcacctgctcacatccatacagcctcggccctcgccctggctgtgtaccaagagtcccatgcccagacctctgctgagtctccgagctcctggtcatgccccaggcctcctgtgagaagcagcgctgcatggaccatgcctcgggacctcaccctgagctgggaaccttgctccagtcccccagtctcccttagaggtgccccacgccccatcactcttcctgctcgaggggtcagataggggaagccagtgtgggaggcccagaggtgccgaagcggacgttaagtgaattctgtgtttgtgcactgggccttggcagacactgctgactcagcctcttccccaggaaggagagtggggtcccaatccaagttgtggcctcaaaccctgtgaccaagagtggggaaaaggcaagacccctcctcccagtcttctggaacagccaatagtggtggaaacatggggttcacactgaatttccttgtaacctgttgaagagaatgtagcccacattttcaggggtggaggtctggctgatttggcagtgtgcccatccccccggccatggtttactctgaaccgggcaccctgggccctccctcagtgacgcagtgaagtcactgtgacgtgtgtagttggtgagaaagtgcctcctgtagtgttttactcttcttagagggtgaataaggtttgtttattataaataattatttacagaatacatgaggtttaagctgactgcaggccacgtctcgtcctccagacggccttcctccacggcataaacccacacaccaccctagctagagctggtacccccacaggctccctggactcaccctgaaggggggctggattttctgcctgtcccgatgagagggctacaggacagtccccagtgaccccttctgagggttgtaacctcttcccctggtattttcctgctctccaggaatgtttcaagcttccagcagaagcctacccaccagagtcgctttctaccctgctcaccatccctcttccctcactcattcagcagacccccatgcacagcccagtgcaggagttggggtgggaaggggtcccaggtgggctggagcaaggttcccagccagggcggggtcctgaggtgtggtccacagccgggactgtgattcggggggcccttgccttgttccagccccggcaccaccgctatcctcgtgctcaatggactcactggctccaggctctaaaacctcagtgaggtctgtagacagggaagagccccactcgtgggtagagagactgccaggtccatttgcctgttatgaaccatgtggcctcggacctgccattcctcctctctgagccatagtcttttgtctgaaaaatggataatgatggttaccacatcaggggccatcatgaagacaaatggagatgaaacggaaggggctcagcacggaacctggacacagaagtgctaagtgtgtgttaccagctgcggtggctgccaaggcccaaccacatggcagccactggctgagtggcgggcaggaagtggggggcaggggcatgcaagacgggccttcctgaagcttctgatccagtgagataagtatacacccagctctttttttttttttttttttttttttgagacggagtcttgctctgtgccccaggctggagtgcagtggcgcgatctccgctcactgcaagctccgcctcctcgggttcacgccattctcctgcctcagcctcccgagtagctgggactacaggcgcccgccacctcgcccagctaattttcttgtatttttagtagagacggggtttcaccgtgttagccaggatggtctcgatctcctgaccttgagatccgcccgtctcggcctcccaaagtgctgggattacaggcttgagccaccgcacccggccacacccagctctaagatggaatgtcccaggaaagtggagactgcaaaggctttgtggcccaggaatgtgagatgcacctctgggcactagaatttcaccagagctcggggaggaggtcagctcagatatagggacaacgggagagatgggagtgagaaaacggcttggtgtccggaggtggagcctggagaggtgggcatggggacagaagagggccttgggggccaagggcccatgtgtccaggaggtggaggcagtgaatggggccaggatcggccccacacatggtaccaccagccctgccaagcctgcacctgctcctcgggccacctgagtgccgctcccacctggcaccccttggtctgagtcctgcttcctgccctcgtgggaagagtgaggctactcacacaaagtccctcagctgtctcttcctgtcctggctgcctcctggccttgcccagggttagccgttgacctgaactgcccggtccctcctccccagactcctggggccttgccctggcaccaacagccaccttcatcttcatcattcactcatgcattcacccagcagtgctttttgggcatccactcagtaatatcaaggcgctgagatgcggctgtggttaagaccccaggccctgtctgtgaggacctcacagttgccatttccccagagcacagccccagccaggcacactgtggggtccaaaaagagaaactgacacatcgcgttcgtccatttcgagttgctgtgaaggaatagccgaggctggggggttatttggctcacggttctgcaggctgtacaagtggcgccagcatctgctcggcttctggggaggccccaggaagctttccctcatggtagaaggtgaagggggagctggcccgtcacatggcgagagagggaactcccagacttttttttttattttgaggtggagtctcgctctgtcacccaggctggagtgcagtggcacaatcctcggctcactgcaacctcagcctcctgagtagctgggataacaggcacacaccaccacgcccagctaatttttttgtgtttttactagagacggggtttcgccatgttggtcgggctggacccaaactcctgaccttgtgatccacccacctcggcctcccaaagtgctgggattacaggcgtgatccatcgcacccagccctcccagactctttatagcaatcagatctcccacacctgatgaccatggggagggcaccaaaccttccatgagggatccgcccccatgacccaagccctgcccccacaggccttacctccaacatcagggatcacatttcagcatgagatttggaggggacagtgtccaaaccatatcacgcatgacctgtctgtgcatgcctcagtttctacatctacagaagcagtagaagctccttctctgttccttgttgagagggcagtgggggagaaatgactcagggatgggaggctggtcccctgaggggccctggtgtttgtggagtgggagtgagggaaggcccctgcttcatgtgtgccgtgctgggcggctcctcacagctcaccgtggggctccccgaggactgctggggaaaaaagagctaattaacttggagacccgactgctgaagttatcattaaacttgagcaacccaggggcccctctccctctggggcgcatgtcacctagcacagtgaggcttaattgaattttttcttgtccatcaaagctcctggctggtgtggttggggtttgggatatggggagggagagggcttgggcctcttccagatttggagtgggtcccccagagatggcccaggaaaccgcgggggccacccccagcagagatggcccaggaaaccgcgggggccacccccagcagagatggcccaggaaaccgcgggggccacccccagcagctgggggctcctgcggtcatttcctcttggtcgtgttgagcagccctagcccctggagccctctgctggggatgcgagggcctgctgggccagggtcctcactgccgccgctatgcacagctgcgtcttgcatctggggagtggggtgctgagtggggtgtcttaggaggcaggttttcccttcttgtcccttctacccagagaccttggggacgagttgagtgagacctttccggtttctgactggctgtgtttctgttgccatcccccactccttttaagtggaggtttatgacttccttctttatttaaaagggtcatttagtgacttagcagattccagtctgtgtcacccagggcccttttaaaaatccatggggaggctgggtgcggtggctcacacctgtaatcccagcactttgggaggccgaggcgggcgggtcacctgaagtcaggagttcgagaccagcctggccaacatggagaaaccctacctctagtaaaaatacaaaaaattagccaggtatggtttcacatgactgtaataccagttactcgggaggctgaggcaggagaatcgctcaaatccaggaggcggaggttgcagtgagccgagatcacgccgctgcactccagcctgggcgacagagtgagactctgtctcaaaaaaataaaaataaataaatactaaaaataaaaatccatgaggagacctctgtgtccattggctggtgtgaggagagggtgaggaggtgcagagagggtaccaggctgaggaccgccccgacccttggactacagaattgaaggagggggcacatgaaagatgttcccagcctcgggctggaggctggggacatccgaggacaaggacgatgctgtccccgctcttgcttgcagaggagtgcacagggctcgctggcctcgtgttgctgtttaagtgatagctttatggagatagaattcgcatactgtgaccttgacctttttaaagcctacagttcaatggttttgctgtattcacaaagtggttgtattagggtcatccagagaaacagaaccaatagaaggtgtgtacgtgtgcacagatagagatttattcttgtgaagagttgactcatctcatttcggaagttggcaagtgccaagattcgcagagtaaatcagcaggctggagacttgggagagcccgtgatgtggctctggtgtccacctgaaggcccaagacccaggagagccaatggtgtcgttctggtcctgagacccaggaagagcccgtgtgtcagtttgagtctgaagcaggaaaaaactgatgttccaggttgaaggcagttaagcaggaagaattctctctcactcaggccttgtgtcctattcggaccttcaggtctttgtcacaaaatgacaaaggcccgatcagaacaaaatctgagaaaaacaaaaccctttccttctatcggttttggattcattggctaggaccctggaaattagactgccagagagattaacaggaaacaagcgtaacaattcaagtaagttttacttgacacagagccttcataaggaaatgaagacgcagagaaaccgttagcctgagcggtttttgttttgttttgagacaaagtctcactctgtagcccgtccaggctggagtgcagtggcccgatcacagctcactgcagccttgacttcctgggctcaagctaggacccagctgccggccacaggagctgttctgaacccactcttaagtcccagctcagactcccaagtagcagggactacaggcatgcgccaccccgcctggctaattttttattttttgtagagacagggtcccactatgttgcccaggctggtctcaaactcctgggctcaagcaatcctcctgccttggcctcccaaagtgctgggattacaggtgtgagccaccgtgcccggcctaggcctgagcagtttttatttgttttgcttgtttgttttatttgttttttgcttgttttgagcagtttttctttttgtttgtttgtttattttgcttttctgttgcccaggctggagtgtagtggcctgatctctgctcactgccacctctgtctcctgggttcaagccattctcacgcctcagcctcctgagtagctgcgactacaggcatgtgccaccacacccggctaatttttgtatttttagtagggatggggttttaccatgttggccaggctgttcttcaactcctgacctcaagtgatccggccacctcggccttccaaagtgctgggatgacaggcgtgagccgctgtgcccggcctaggcctgaacgcttttatgctgggtttgatgaagagtggaaagtcgtgggaacctgtgacagagcaacaaaagatgagctgaccagtgagccaggcggggggaggtctcggcaaggcctgtgtaccggtgcccctctcagatcctccatctctggagatgaggctgttcgtttcccctgggtgtagggagggcacctcttacatgaggggcttatgatctacttcggagaaggggcagccagcgagtccttcttggacctgccatttcttcaattccttcagctgaaaatattcactgtgccaaggcactgtatcttggagtgtgccttccaaacccttcacgggtgaggctcacccccatcagagcacgcaatctgctttccccgggctcctgattgcacccttttcccgtttgccccgagaacactcaccagcagtgcttgtggctgcagcattcaccccgagataactttgctgggaagtagcttgcttttattattattttcacatcactctagtatattgacttcggaaacagaagacatcattctgtttatagcatattccatttttagtagtggtatttccattaaaaaaaaatggtaattctcagccgggtgtggtggctcatgcctgtaatcctagcacttgggaaggctgaggcaggccgatcacctgaggccaggagttggacaccagcctggccaacatggtgaaatcccgtctctactaaaaatacaaaaattagccgtgcgtggtggcaggtgcctgtaatcccagctatttgggaggctgacgcaggagaattgcttcaacccgggaggcagaggttgcagtgagccaagatcgcgccattgcattccagcctggacgacagagcaagattcaatcaaaaaaaaaaaatagtaattctcgatcgctgaaaatgtcaaatcctagagatcacagcattcctacgagtgatattaacattgttcttcatcagttgttggctgaagattcgtttgatgaatccgatttttccagaatagatgactcagatgatcctgttgttttgcttagaaataactgcgggaacaattaaaaaattttttctttttaatttttttgttttttgagatggattatctctctgttgcccaggctggagggcagtggcacaatctcggcttactgcagcctctacctcccgggttcaagtgattctcatctcagcctcccgagtttagctgggattacaaggtgcctgccaccacacctgcctaattttttgtatttttagtagagacggtgtttcaccaggttaacaaggctggtctcaaactcctgacctcaagtgatccgcccatgtcggcttcccaaagtgcagggattacaggcatgagctaccgcacctgtccggtttttatatttagttttcacatagaacatcagtcagatttgcttcagcctcaaagagcatgtttatgtaaaattaagtgagtgctaggagtgagctgaactttttttttttttcccctaaaaggtaaagagttaaatattaaactcatccaaaaataccctcgcagacacactcagaataatgtttgaccaaatacctagatgccccatagcccagtccaattaacacagaaaattaaccatcacagttacacagccatcgccattaatcccagcacgtttcatcatccccaaaagagaccctgtcgccattagccattccccgttcccaactccgggctctccgcccctagccaccgctcatctgctttcgtctctatgaatttacctgttctagatagtttgtataaatggaatcctacaatatgtggccttggcgactggctcctttcacttggtagaatgttttcaaggctcatccacattgtagcaggtgctggtgcttcattctttttcatggctgaataatattccatcgtggataggccacactgcgtatctcttcatctgctgatggacatttgggttgtttctgcttggctgttgtgaagagttctgcagtgagtgccggtctacaggtgtttgtgtgaacacgtttttcatttctcttgggtaattacagggtcatgtggtttagccaaccagcctttaagccatgtgtctgctgagagacccaggcccggtgggggtgcattgcagtgcttggccagccaggtgctgcgcgtccgtgtcacagccatttctctgtactgtgctctgaggttgctctcacaggcgtcgggcactgtgagccccaggaggccaaggccccctttgtttcatcttgagtccatgcctcgctccatgaactaggatgagtggacattgaatcagcacagggacgggtgtggctggggatgcacaatggccccgggggcctgcagctgggtcctggctgctgacttccagtttcctttgcctgttggaacccagaacaagtcagaaaggggaaatgcaaggttcgtgtgtcttttctgtggtatattggcaggcctgggtgggtgagctgcttgcagctagttgcagcctgagagaggaagtgggaggggagggagagggtgagtttggtgtaactcacccctggtagggggctgggctgaggctgggggaagtgacttatttttctgagaggattcttccctgggaccaacttcaaatccgggttgacaagaccttcctgggggaggctggaagtgctgggggccccaggtgagggtggccacaggtctcccagggccaccgtcttggggaagcaatgtgttaccgtgtttctggactgtctcacacacacacacacacacacacacacacacgagtaaactgtaacacaaatgtgtacccgttaaagtgcctactttaaaccaccacatgacctgtaaaacgaaggccctggccctggcccgcatctgggtacccactccccagccagccggtgggcagtttgtgctgcagtctgttaccatccctcagggacacagccgaggagcccagttggcttggaaggcccagtggctgcaacctctggaaaacggtcaggctccggccaggccccttccccctcccagccttgggagaaattaccatatgaatgtagcttcttcccggagttcgggctggaaggggcctgggaggggacaggcttccaccctaggagcttccaggttccggctgccgcccgtgttggctgcgtgagcgtgagcgagccaggggtcgctactaggtggaaggaggaagccggcatttcttcttggagatcaccgttggagtcccacagtaggtcaaccccaggccttgggtcctcgggaggaggagaaagaagaaaagcaggaagtatggagggtgggccgggaccagaagggacacaggattggggcagtgtgggagaccctgggggctccgtcatttaaccagctaacatcacagtgttcataagaacacactattactgcggttttattactttgctctgatttcaaaaggcacaactgattactttagggaacggagaatctaaagaaggcctcacaggagagggtcagttgcgatcaggtaaatgtgagccgtttataaaccgtagagtgcggagcaccggtcagccctggggtcagtgttcctttgatgctcagcttggcctctgtaccttttagtgcttgattgagctctgtgggggtcagggctgggtctggtacattcgggacttctaccaagcccctggcagtgtctcagttactaaatccagtttgccagttactaaatccgcttagccggttcccgaatcactcttccgttggggccggccatgtcacgtcaggcttttcatgcaggactgcagatggatagacgctgggaccaagtcatccttgggccacaagatgtctgagcctctgctggtgtctgggaagatgctagccctccgtggcatgtgtgccacgcagtgcttggtgaccagcggcctctaagggacccccctgcctcagtgtggggactggcctggccaaggtctccgtgtctggttggagccaggcataggctcaggtgttctggctggaggccccctgcccacgggctctgcttgtcctgtgtccctggtccttactgtgtcttctgtgttcctagagagcccccaggggtcctgagcccagcactggggttggggaatgggcggggaagtgggtggggattagagtccctggctggagaacagccaggccccaagtccccgccccactcccctccccaccgggcgcctcatcccacactgaccatttcctgaacaaaatttcctgaaccggcctcccaccctggctgtcccaggaagctcatccatccttccgccttaatgctttgtggctccagaaggacgatggaagccggaaatcacgagcctctcattcacaggtggccacacaccaaagccgcgggaacgccgtgggaagggactctggccagcacggccggcacagagggagttgttaccagggtagacgagtggtgttaccggggtagacgggagccgtggctgcccccatgctggtctgggagagaggaggggccggacgaaagggcagcaggctggccattcattcattcatttattcactcattcagagcatctcactgggtgcttcggacgtgtaatgttttgtgggcagtgaatgcgacagaccccagacagcaatctgagggccacgtgtgtaagaactgagggacccagtgtagatgagctatcctgggaaaacaagagggagttctaggaacagcatggagaaaggatggccccagcagggaggacctctgtgggtagcctcgttggaagagctgaaaggcagccagggaggctgtgcgtggatggaagctgaagagtaggttaggggagtgtgttttgttaacaaagacttcaagcatttactgaccaggcacaacactatgtgcttcatatataaatatctcatttgatgcccagcattcttatgagacagatgttattatcccatttcacatgtaataacattgaggtgtagagtgtttaagttacttgctcagggtcacaccgcacgtcggtggtaggacaggattctggagccacaggaatatggtttatcccaggtgcaatggaaaccagtcacggcttcatggagggaaatgatcagattaataaattttccacaggcctcctgccgctttgaggaggagggattggggtagggacagttaatggtggtagcttagattgcaggtgtctgtgagatgtgttgggttaacattgatggaagtttgggatggatgagtggatttggagtaatggaaatggagggcccaggcccggcccctagagatctagctgcaatagctgttggctggagaggccgttcactttgatggaggatggggtgggaggcaggtgggatgggagctccagagttcagcctggggcacggtcgtttggttcaaggtgtcttcagatgtcggggcttgacagtggcagtggctgcagatagccaggacccagcagagggcctggcacagtggggcccagggacacgtctttgagtcaggctggcagtcaagtgtgaatctggacaaagaaggtggcattgttggcattgaatgtccaggggctgggtgaagtcagctagactccgcgggtgagggtggaggaggagccagcagaggctgaaagaatcgccagagactggaggaaggtcagcagaaccatgcacagaagcctggagaagatttggggaaaagaagggctgggtggtcgtcattccctgcagctcggaggcaagggtgacccctgtgtgtttcattcttcagaggactggtggctccgtctggtcagaaccccaagtccagaggtgcatctgagcttcatgccacagtgcaggcagcaggggccacagtgcaggcccgcgggatcacagtacgcctgctgcttcctggtgtctcataccctgagctcagggttgcttggatgccctgtgcagcatcccccaaggcagtgttccagagaggatgaaagtgactgtctcgaggtgtgaccaggtagtggtctacgcacactgctttttcctggggaaagtctgggatgaaagggtatgtgtgtgtttctgagactccttggataggcaacatccacctatccacccatctttccacctacctgtctttccacccacccacccatccaaccacccactcatccactcacccacccatccactcatccacccatctgtcgatccacccatccactcatccacctatccactcattcactcttccacctatccactcattcacccatctatccatccactcatccatccatccatccatccatccatccatccatccactcatccacctatccacccatccactcatccactcatctactcatccacccatccactcattcacccatccatccactcatccacccacccacccactcatcatccattcactcacctacccatccacccatccactcatctatccatccactcacccacccatccactcaaccatccatctacccatccactcatccatccatccactcacccacccatccattcacccatccatctactcatccacccatccactcgtctactcatccactcatccaccaattcactcatccacccatctactcatccatccatccatccactcatccactcatccatccatctactcatccacccaaccatccagtcattcatccatttgctcattcatccacccacccatccattcacctgcctgttcatccacctacccatccattcatccatctgtccatccacccacccacccactcacccattcatacacccatacacccatccattcatccaaccatccatccccatccttacttcagaaagcatttgaagttgctggggtgtgcacttagaaaatgcgtcataagctttcataaggcctctcttcggcttcctcacttctttggtctttctttcggacatgcaggattctgagcagctcttctgggaggtgggtgcagtccaggtaggctgcctgcgaagctaggaccgagggagccacatccaaggccttgtgggttcccaaggcaatggcactgtgggcccactgcttccagacctcctcaactcccaggctcctgagcaggaggactcctggggcagggcctggagatggggagagaaaacaactccaatctcccaactctcgtcagcccaggtgggtgctacatggattgggggcacctggagcagctggccccttcaccgctttcccgcaccttcccagcccctctggctagaatcagacagttgtgtgcatctttctccctcctgaaggagtcatttagtcaggctcctactcatggcccaggaatgtgcccctcctgcctgtcccccacccccaagcaggccctggggcagcctctgcagcatcctcagggcctgatctgcacagcagaagggaattaggggaaagctttttttttctacccagttcctggcagggagccaccctgttgcaccccagagacccttgtctacgttttgttatttcagatgatttcataagttgggggaggtggaaccccagaccccccagcccctgttgttgcctcactgccaagctctgctgtgtatctgctgacaggcctgctgatagcagaaggggctggagagagggaggctctgggccctgccctcccccacccctgcttaggggacatccctgataagaggaaattccagcctgtgacagatggccagtgtccacccacccacgggggaacttttctttctctttttaagtttgcagatttgccaagaactaatggaatctctgtggttggctggccactgtggacatggccagagggctggcacaggctggatcttggggttgctttggggtaggggccgctcctgctagaaggttccctggggtgggggaggcatcagggccattccctgatcctccctctgcagtggatccacttcaggggcgggggcaaggcaagagggcagcagaaaacagaatataaaatagcatcccccacacaccgcactagaagtcagaggattcatctttggcctgccctccctgcagcctgagttctgagagtggctctttaggaagtgaatggcgatggtttgcaggtcagagcttgctctggcccaagattgatgtctcaataggccatggagcctgggtgaaaaaactcaggctagggaggtggcgggttgcaaatcaaagaacagaggagggcctcttccagaaaggggcgggtggtgtggggagcccttggaccttgtccaaatttgactttaccgactggggccaattgaaaccgtgctggcagaaaggcagagctgcttgagattccttcctccacaatagaggagaggtttgcttgaaaaggtttggcgagggaaaagctggaggaaccttggccggcattaaaagtggggacccctgccccccctgccttgggggcacctggggcccctgaatgaatgaaagaggaggctggatagagacagactcacaccacctgtcctttccaggtcctgcaaaggagcacacagggttcttgttggctcttccaccttgtcgctccccaagaaggagagagcactgacaggggaaccgtaaagctgtggctttgtttaagccccatcgtggaaaccggaaagagctccagctcggagaaaaatgcagctctttgcctttgcaaatccgtgtctttctctgggaggccagagccattgtgctcaatttctaagcaggatttcagagtttctcaggaggggaaggcagagtctcagatttccggcatcccaggtcctaagcagactttgaggagacgcttcttgccccatacaaagtgtgaagtgtaattggatttggagttagttaacaaattagatgagctgtgtgcattttgaaaattcagtcctcgatcccccacccacacacttttgcacaatttggtcatttatattcagtgtttccatctttagaagagaacaggaagtccccagtgacatttatggagtgtttgtagtagcttgggtaggttaataggaacacaatgcagtgaaaagcggagttgagatgggaaaatatcctgttttcaccccagggatgacattcctcaacatctctgtccaccccctctggagtccactgtccgtgaacagcaacttgttctcacttgggggctcttcctgccggagctcagggatggaggccagctggcctcaggcttctcctcttacctctttgtttctcagactaatcttctaccttgaataatttttttaacctgccctccctcttctctagctgtagaactcagaactttgtgtgtgtggtcgaaagtttagagagtgctgaaggtaatgctgagataaccctattaaattctgtaagttctcatcacaccaagttcttttttttattctcattttatttcattttatagggatggggtctcgctacattgcccaggctggtcttgaactcctgggctcaaacgatcctcccgcctcagcctcccagagtgccaagttattgtttttaattgggatccacttaattggatccacttaattggcctagggattctttgatggaccctccaaaatgtgtgcatgtctgtctgtctgtcttcaatgtatacttttctagggagagtctttacttttcaccagattctaaaagaggtttgtggcacacacatgtcctgtactattgtacaggacaattcagattgtgaattccttacatgttaaagactgcttcagatcggcccggaagtctttgctaataaacatttaaataaacgaacttgaaattcccatgtgccaccgctgttttcattctgactgttctcaagcctatagtgtcatctgtttgttactgtgaagtagacactcaataaatgcttgtcaaatgaatcagtgttgtggtcttggtccactggaaccccgggatcatcgtctaccattattgtctatagtttctttaccatcttgttccagagcagttctttctctgaggtctgcccacctctgcacgtgtgtccagtttccagccctgttgccttatcattctctttcctttacctgcatttcctgaactattaatagttaacaatagcttctccctcaacccactcactcatacctgaagtgaaaagtcatcgttgaggcctctgtggattttgtcagcccaacctggggcggccttctggaggtggagttttcagatgagggatggacattttggtgtctgctgggtagatccacctgggagctttggcaggggccccggggcagctccgtctcttcattttggctgtgggacccctggtgcactagggttcctcaagtaagcatctgtgtcctgggagagccataggcctgagagggcccctggaatctgggacccccagcccggcccagtagctggtacgatcacctttcttgcaaggaagttatggaaactaaaacgctcatgggctttgataggcctggagtggctctaagccctgggaagagccctggcaactttccccgactggcgggtggaatcttctcctggcagttcagggctctgcctccaactccctgggggagagcaactgagggaggagctggaggccaaggcctagtgctgagctgcccacaccacagttggcaccttctgggtcctggctgcaggaaccccatacttctccagcctttccatggtgcccaaagacctggcctcgggagggggtcagcagcctggggctcacctacctggcttcaaatcctggctctaccgcttactcgctttgcgaccctcatgactgacaaaagtcctcttggcctgtttccttatctgtgaaatgggacagtatcagtgactactttataggaatgtgtgatgatccatgagttataataattcctgagcagcgtttagagtaacacctgggactgggtgctgtggcttatgtctataatcccagcactttgggagaccaaggtgggaggatcgcttgaggccaggagttcgaaaccagcctgaccaacattagtgagacccactctctaaaaaaaaattagagtaacgcctggcacagagagccccagtaaacctcgacagctctgatgagctttgcttcttcatttgttcatattcattcaccagactttttgccggggctttgccgtgagccctacggtgctctgaagaaagccgggccggagtgagcgtgattgatggatgaggtgtctggcttcacaaaccctacgtgggggggtcatgttgagaggaaaccgcacacatcattattcagttaccatcgtggggagactgcctggacgcagagggcaggctctgtgtgggagcagggaaggtaagccctggttgcgaggcagggcttccccaggattcagcagggatctgaaggactttgcaggcacccagggaggtaggagaggaagagggagcagccctggctggaccctgtccccctagcattgcctgcatcagggactcactcacctttaagaagcccctttgtgggggacagggagcatctgttaattgataggacctgaagtcctccaggagctcaagggttctgggaaggcctgcaggtggcggtagggctgccgcaggagtggtggccccagggtctggattccggggagcctgtagagggagggcagcttgaggctgctcctgtgtgtgttgttatgaggcaaagtaaggagagtgctgggcccacgctgggccggggtggatggaggcaaggaagtgttccccagggcaagagcaccagctgcagttgccggcagctttctcctggacacgggcctggaaggctgacagggtgtggtgagtgccactggctccactgctgtggcctggtcagtggcttcacaggcctccgtgggcaggaggaggatgactttgcattcagcttggccaccattggcagtgactgacgaggtgtgtggggatgtggccatttcagtccatgctctgagagccaggcgtgggttggatttggggaagatgggaatggcattgacttgacttcagagctttgtcctggggtgcaggcccggctgtgacatgggtaccaggtggctgtcccctgaagctgggaacagcattgggccgtggctcagggtcccttgccccagcgacaccatctctgcatttggccagcaaggctgatgggacatgtgtggacatttctgggtcgtagaccaggcagcatgacacacagggaggggtgggcagagaagggcggcccctgggtcttggtttccaagtcgggctttgcaagcctgctgtgtcaagcctctccctcggcaccgggccaggtgggccaaggtcagccctggggctgtaatgaatgtgagtgcctctaaattgtgccacatccaatagctgcctcctctctgggcagtgtctcccagccagatatcctacagcccccatcccagccacagacagtgatccgattccctcatccttggcaggcccctgcgcttgtcaccaagcgcagacattggcagagggtgctggctcaaggctgagtggattacagccctttcatccctgccttagacccacccgcagctctggagaaaagatggcccagtggatgccggcggggaggagggagctggtccccaagatgggcagatgtaggggcagtccccatcacaggaccagtgacccactgccaccagtgccagtgaatggcagaggggccctggctcaaggcctgggttcacaatgggaacctgcagagaaaccgtcaaggtctcctgccacctcacacctccggctggctgccaccccagaaacgtccttgctgcaagaagatggggggcttgtctgatggggggcttgtctggggcacagtctggcaacaccaacttgaggaactcaggcctaagtgttggcatctgggcctcaactgtcctctgagctgtaaagctggctcctgggcacttgtggaaaacattggactcttttctttattttactttacgttctgggatacacgtgcagaacgcgcaggtttgttacataggaatacatgtgccatggcggtttgttgcacccactggactcttcagtccatctccactagaaatgactgccttctttccctccttccctccctccctcctcccctcccttttttccttccttccctccttcctttcccctccctccctcccttctttcctttcctctcccttcctcatggggatataatttccatattacaccatccgccgattcagaaagcacagttgagtggcattttttcacagccttctataagcatcacctctaattccagaatgttttcctcaccccaaaaggaaacgccatcctcgttacacagtcactccccttcccccagcccctggaagtcaccagtctgctctttgtccctatagatgtacttactctgaacgtttcatataaatagaaccataaaagatgtgaccttttgtgcttggtttcttgcagttggaatgttttcagagttcatctctgttggagcatgctcgtgcctttttatggctgagtcatagtccactgtgcggactcaccacggtgggttcctccatgcatctgttggcggatgtgttagttatttctgtagcgggtgtgttgtgctacccaggggctgcactaggagctgggatatcactgagcaagccacagccttgggcacccgggagctcgcagagcaggagctgggagggaggtcaggaggtgctggcctgtttcccagggtggagagacttggaaaaggtcatttgaaaccagaaccagaaccagagccccaggcccctgactctcagccgtggagccaggagggaagctctgcattttgctttgactgtggggtgacctgtcagttactgtccaaatcagaacctttctgagagtcaacgtgggtagtggtgataattagtctggatacccgaaagaatggaaagcagggacccagatagatccttgcacacccgtgttggtagcagggcgaggcctggaagtgcagtggggatcccaacggggcagctgccgtcgtgctggagcccgcggtctatggaggggacacaggtgttaaccacatatcacaagcaggaatgtgaaatttcagggtagtcaaattcagtgaaggccttgtgctggcctggccacttatagtggcatttcaggaaaaaaatcactctgtggacctcagtttctcattagtaaagagtaggttggactggaattctgtaccatccagtatagttgccgtttatgaaatgtggctatttaaatttaaataaaaataaataaaaattcccttcctcagttggactagctcagtgtccagtgctcagaagtcccttgtgaacgcgttgtggcaattcctcaaaaaactaaaacaagaactaccataccatcccataattccacttctgggtatggattcaagagaatgcacagcgtcttaaagagctagaggtatttgtacacccacattcatagcggctctgttcacagtagccaatgggtagaaacaacccgcatgcctgtggtcaaatgaatggagagatcaaaagtagagcaggctgggtgcggtggcccatgcctataatcccagcactttgggaggccgaggcaggtggatcatctgaggtcaggagttcgagaccagcctgaccaacatggagaaaccccatctctactaaaaatacaaaattagccaggcgtggtggcgcgtgcctgtaatcccagttactccggaggctgaggcaggagaatcgcttgaacccgggaggcagaggtttcggtgagccgagattgcgccattgcactccagcctggacaacaagagcaaaactccggatcaaaaataaataaataaataaataggccgggtgcggtggctcaagcctgtaatcccagcactttgggaggccgagacgggcggatcacgaggtcaggagattgagaccatcctggctaacacggcgaaacgccgtctctactaaaaaatacaaaaaaactagccaggcgaggtggcaggcacctgtagtcccagctactctggaggctgaggcaggagaatggcgggaacccaggaggcggagcttgcagtgagccgagatcgcgccactgcactccagcctgggcgacagagtgagactccgtctcgaaaaaaaaaaaaattaaatacataaataaaaaaataaagggtggaacatacaaggaatttgactcagccataaagaggaagttgtgatacctgtgacagcacgagtgaacctttagggtattacactaagtgaaataatttggtcacaaaaaggcaaccctgtaggatccacttatacgaggtccctagagtagtcagattcagagaaacagcagaatggagcttgccagaggctcgggggatggggctggggagttgtttaatgaggacagtttgttttacaagatgaaaaagttctggagattggttacacaacattgtgaatgtacttaacaccactggactgcacacttcaaaaaagtgaccgtggtaaatgttatggcaattaaaaggaaaagtcacgtggccagcggctaccacgctgagctgcgcaggccctggacagtgtcgtggtcacagacaatggagtggctggtctttaccattctttccagccgcccgagcaccatggggtccaggggccaggcccctggtggctttctgtggaaatcaaagttttagttcacaaaagtgtctctgggtgtggggtgtctgcttctcccacttggggttcctgaaggcagaccccagagctcacctggccaggtaggagagcgaggcgggctttggcattgctctctctctgcctgcctgcgggccagctggggcctgcaaggccgcctgtcgagggaggggtcgcaggaatggctctcacctgtgcagaaggccagccactgccctacgtcaatggcaaagatggggctcggcggtgttttatgattatttctcaagcagggcccctggcgggcaggatgtttggtttgactttctgcagagtgctggtgcctggggaagggcccagctgcagcagaggccgcccctctctcgctctgggccccaggggcgttgggggcgaggaaggagagttcagggggcagcacctccccccaggccttgctggggagggttgaaggatgctggggggaggtgggggtgggtaggggctggtctcagtcccgggcaaaatgactctcagacccacaggcagatggaagcaattttcggtcacgtgggtcggggctgaactgctgccccgcaaggcaaggccccatgtctggctccaggaagcggccccgaagccacatggtccggggccagatgcaggctgtgtctttgtttatttaaaggttctgaaagcccaggggagagtatttctgaaaggggagcagaagcaggagcaaagccccaaaggcttccaggctgcatggcctgggggtgggggcacgtgggggcacagaaagaggagatctggcctccaggtctgcctgggggtattgctgtcagcagtggagctgtgtggacccccttggcggttcccaacaaggaatgatattgttcctttgttccccctgttccataagataggaattcctgcgccccgtggaggctgagaagacagggaggtgcttgtgaggataaaccaggccccagtttctggcttccagagtcttttcctctctcacctctgatgcctcaggcctggggagtctccctccgacaccctctgaccgctccagtgaaataggctgagggggatggctggaggcgtctggggacgggggtgcagccaggtggaggtgctcagtgagcattttttgagttcggttcttgcccagcaagtggaagggcagttgaactgaagtctcccctggcccctcctggcctggaagcctgcctcccgccttctgggcagggtgaggagtgggcgtgggccgcctgcccgtcaccggggatgtgccccctgcagcctcccacgctgtggccctggctcccacgccggctccactcccctgtggctgtccctggtgggtgcccacccttcccagggaaaagccactgccctccccgagggctggcaggagaggccctgcctgggagcacgctgtgtggtccctgtcttagcgcaggatgcctgaggccagatcctccttgggaggcaggatggggcgaaagtctcccggcaggcagagcagggcccaagcggggagggggcccagaacggcagcagcccagcctgcttgggagctgagggccaccaagggcagctcctgcctgtggggactagcggaggcaccgcctctgtgaccagcgagttgtctgcacccacgcgcatgcaccagtgagtgtggcgagtctgcggtgcgctgggacctggcccgtgtgccctccagccagccctggtgggaaccagccccatcctgggaacccctggaactccgctgcgtgggaggatccaggtctttggcaggtgccttctgggcgcccgcccccagccccaggcctctgacccatgtgtggagtcttaacagcagccaaggcaaggccggcgaagggacctacagacagaagacgcttgagtgatttcgggaagttcagccccacgtgccccacagacctgagagtaaaacttggtcctggcctgtgggtgtgcagcccgcgggtgctggccaggcagacaagacggccgcctgggtcagtccagggggaggcagaggtggactgggcgccccctcccctccatgcacccaggggcagctctgcacccaggtacccgccctgcacccagcacttttccttccctcaggactactggctcgtggtatgggattgaacacacaactccatggggacgtacgctggttctatccccctttcttgcaagaccatccatggagacatgggaggtggggacagatgctggttccatccccctttcttacaagaccgtccatggggacgtgggaggcggggacggacgccggttctatccccctttcttacaagaccgtcgtctatggggacgtgggaggcggggatggatgccggttctatccccctttcttacaagaccgtccatggggacgtgggaggcagggacagacgctggttctatcccgctttcttacaagactgtccctcctgcatcttggctcccgggtcggcctctaaggcctttgaatggcagcaggtttatctgagtggaggtgaaggagagggccaggtccacctgggtggctggaggccgtgtggaggccgggagaggagagcgccctacacccttgtctgagcagccctccagggtatagagacaggagtttagggtcagccctgccttagagcggagggggcccccaggttggcacaactcctagaagaggagatggaaaagcctggccttgggagtctggggatggagctttgctggggaggcagcatggctgcaggatggtagctttttagaggacaccatggccaggggcatccaccctggggaattctcagggatctcctgggcaagtcgctttgcctttctgagcctcagtgcctcagtttctccatccaaggctgggtgtgacatccacctggcaggtgcctgtgtgtgaggccctgtctcgctctaactcctctgctcttccttccccagccactgagacggctcctagctgcgttggcgacatggccgacacccccagagatgccgggctcaagcaggtgcccgcaccacggaacgagaaggccccggtggacttcggctacgtggggattgactccatcctggagcagatgcgccggaaggccatgaagcagggcttcgagttcaacatcatggtggttggtgagtcctcgccccgcctgccactcaacccatgctagaaaccagcctcagcccccagggcgggttcacaagcctttgggcttggtcttcccttctgtaaaacagggcagcaaccctgacctcaaggacagatggccagtgacattgcgtgtgcgtgctgcgcctgggaggagcccacagcctccagcggctcctcagaggggcctgtcctgcacatgcagggcccctgagatgactttggggagcccaggccggcctggagcaggtcctgatgaacggttactgcctctgagcaatgacatcagcctgtgcagagagtttctgtggcagctgtcccctcactgttgctccagcctggccctccaggctccccgccgcagcctggctggaggctccccagcagcccagcttcagcacctgccctggaattgcggcctcatggcttcaacacccccggtggccctggagaactggaggtcaccacgggaggtcgtcgatcagtacgacctgggcagggtgagggggctgggctggaatatacagtgggctgcctcttgtttccaaagtcccccaggtcccattcaaacctcacaatgaccctgtgaagggggcgtcccgttttccaggcagacacgaggtgcaaggaaggctgctgaggttccttagctcacagggcagagaaccgcagccaccgttttgactcccagaactgtgttctgcccactccatggggtccagggaggggtctggggaagtgcccccaccagctcacaccctcaacaaaggtgagcttgtggggtttctgtaaggtgtctgggcacctttcaggccaggcctgtttctctaactaatgccagctgtgcatgcccttcttgcgcagctctgtggctgcaaacccacacctgccagcccgatgtctttctttcctcttctgcactgacctgggccctggctcccctggggtcttggtgtcctctctgcttcctgtggcctcatgggacctggctgctcgcggccccactgtgctcacagctgcctggaagctggcagcctgcttcaagggagggtggaggtatggggtcccctcctgtggcccccaccctgctctgcctgttgtgggagacatgcttgtaccctgagaatttagggctgcctcccgggaagacggctagagagaaagagaggggagaggcccaaaggcagtggccaggctgggactcacctctgtgggctggggagggactgccctgctccctagccagggacagggtgagaaggacctgggaacctctgggtcccagccatggcacaggccttcttccagagctttggccccaagaagaggaagaggcagcccagcagcccttgctgcctcctgtggctgccactctaacagccttgccctccgggaagggtgcccaggaggccttcacctgtctgggcctcttttcaaccctgagaagagcagtggtcctgattccccccaaggttactccctcctggtgatgctgagtaaagaataagacatggggcagctctgctctcctccctcctccctcttccctccttcctcttccctcttccctcctccctcttccctcctccctcctccctcttccctccttcctcttccctcttccctcctccttcctccctcccatagcagccatgcccacctgcagagatgcaggcaaggtggagggacacctgtttgtaggtccacagaccccagggagaatcccagctttgtcctaactcagtggcgtgaaacttgtgtgtcttcccccggcttctctgtgagccttggcttcctcatccataaaaagggatcatcctgtaaaatgagattgagcaagcaggccccgggcagggtccctgacaggttgtggttgttcaagaagttacagcagtggtgatggtggtggtggtgataaggatgatggggatggtaatgacagtgatgatgatggtcgtggtgatggggtgatggtgatagtggagatgatggggtgatggtgatagtggtgggatggtagtggtgatgtgggtgatattggtgattgtgatggtggtggtggtgataaggatgatggggatggtaatgacagtgatgatgatggtcgtggtgatggggtgatggtgatagtggagatgatggggtgatggtgatagtggtgggatggtagtggtgatgtgggtgatattggtgattgtgatggtggtggtggtgataaggatgatggggatggtaatgacagtgatgatgatggtcgtggtgatggggtgatggtgatagtggagatgatggggtgatggtgatagtggtgggatggtagtggtgatgtgggtgatattggtgattgtgatggtggtggtggtgttgatggggtgatggtggtagtagtgatggtgatagtggtgggatgcaatggtagtggtgatgtgagtgttggtggtgggggagggggatgatggtggtggtagtggtgatagtggtgggatggtggtggtgatgtgggtgatggtggttgtgatgtgggtgatgatggcagtgatggtgatggtggtgatgggggtgatgatggtgatggggatgatggtgatggtgatgatgggatggtagtggtgatgtgggtgatggtggttgtgatggtgatgatggtgatgatggtgatggtggtaatggtgggatggtagtggtgatgtgatgatggtggtgatgggggtgatgatagtggtggtggtgatggtgatgatgggatggtggtgatggggatgatggtgatggtggtgatggggatgatggtgatggtgatggtgatggtgggatggtggtggtgatagtggtgatgcggatgatggtgatggtgatgatgggatggtagtggtgatgtgacgatgggatgatggtggtgatggggatgatggtgatgtgggtgatgtggtggtggtgatggtggtggtggtgatggggatgatggtgatggtgatggtgggatggtggtggtggtgatcagggtgatggtgatggtgggatggtggtggtgatgtggtggtggtgatggggtgatggtgatggtgggatggtggtggtgatgtgggtgatgtgatggtggtgatgggtgtggtgatggtggtggttgtggtggtgttgatatggatgatggtagtgatggtgatagtagaggtgatagtgatgaggaggatggggatgacggtggtgctggtggtggtgatttgatgacagtggtggtggtgatgagggtgacagaagtagtgatgatgacgggagtgatgggatgatggtagtagtggtgatggtgttgtgatggtggtgctgatggggatggtggtgatgatgagggtgatgatcgtgatgataataataaaagtaacaataataaaggggtacactttaaagtatcccagttgacatcttctagatctaaggtgtcgtggctggaacattgacataactcctgacctgagcttggccaggacacaaacctggtggacagagagagatgggcaaggagtgtccgtccttgggctactaaacagttcaggatggggattctcagcaccagccttggcctcctgggagtccacacttttcctagaaaggtgttatcaaagtcagaacatcgatgtaatttagggtgttttgtttttttgagacagggtctcactgttgcccaggctggagtgcagtgtcatgatcttggctcacggcaacctccacctcccaggttcaagtgattctcatgcctcaagcatgcaccaccatgcccaggagacagggtctcactctgtcactctggagtggcaatgatcctagctcactgcagccctgcactcctaggctcaagcaattctcccacttcagccttctctgtagctgggactacaggtgctcaccactacacctagctaattgttaacattttgatgtagagacagggtctcgctctgttgcccaggctggccttgaactcctgggctcaagcaatcctcctgcctcagcctcccaaagtgctgggactataggcgtgagccaccgcacctggcctagggcgttttttttttttgtgcttgctagcttaacccaaggcagctctgtgccaggtaaagcaatggggcaccgagtctggaggggtgtgtgtgtgtgttatgtgtgagttgttcgtgtgtgttgtgaaagttgtgtgtgaggtatgtgtgagaggtgagttgtgtttgtgtcgtgagttgtgtgtgtgaattgtgtgtgcgtgtgtgtgtgaattgtgtgtgtgtgtgagctgtgtgtgttgtgttgcctgtgaatgccacttcctcatccttgtttgtctcagtcacctgtggactggctgtccacacacacaggcactgtcccttgagtggcaccaccctgcacatggccccacagatcccatgggatgtgcatgagcctgcctgatgctcacaccagctccgcgggggaaaggattgtttatcccattttgcagttcaggaaactgaggcatggtgaggtcagatgacttgcccagtccccagccagtcagggaggagcagtttgaacacctgaggctgccctgggtttggttcccaccaccctggtgaactgcaggaatcccggccacctggtgcaccccaggcagccctgggctcctccgtgagcctggcctctgtcccgtctaaaatctgagccaccaggagacctcctgcccagaaagcacaaggggcacaagagatgcctcctctcccaggcctggctcacctcaggagaggactgtggcctgggttgtgctggcaccagagcccggctgtgtgggtttacagtcactggacacctggctcgagggtgaagtccgcgggtgctgcttggcaggggtattgccgggcggtagcccagacactgctgaatctcaggctggggagcctcatgcctgggtgggaggggccccacgtgcagaccctgctggcctctctggagagacccctgaccggcctcccatcgtctctccagggcagagcggcttgggtaaatccaccttaatcaacaccctcttcaaatccaaaatcagccggaagtcagtgcagcccccctcggaggagcgcatcccaaagaccatcgagatcaagtccatcacgcacggtcagtggccggggcgggctgggggtgcgggatgcccctgccttcctaaagcacagggctgggggtcaagtccattacacatggtcaatggctgggggcgggctgggggtgcaggacgctcctgccttcctggagcacaggtgctgggtgagggtacccaagtcaggcaatcccaggtccccaagacagggactcgctgtgcccaccatccccggcatgttgagtctggggctctggctgtgaggggtcagcgtcgcggacccctgtgggccccgtcacactgagctccctgcagacaactgagttttccaccaaaagtcatgggtgagggatgcccaggggcaccgtcaccggcctgtgccctagctggctgaggaaggctattaatttcccagtgtctccttggttgtcattgctgcctacctggggttgcccctgggtcagtcaggcgtggggtgtctgtgagggtcctccgcctcccctctgactctgtgcacatggctcggtgcagatattgaggagaaaggcgtccgaatgaagctgacggtgattgacacaccagggttcggggaccacatcaacaacgagaactggtgaggcccctccagggggagaagcactagcaggggcttcagggctccctggaccccacccagagtcagcccttggggctccccagcccacggggttgcaggacccacctcctgggacctgacgtgctgctaaagtcgcatgtctcaggggtctgaaaattctggaccaaagcagaattacctggggaatcttgctgtccccaactcacctcctgaggccagcctggggaggctggtttgggaggtcgaggataaggctgtggcctctctgctcagcaagccagacctcccagggcgtgcattggcaggtggggtgttgggctctgagtcctgggaatgggtaacctgcttggggaggcgtcccatgtgcccgctgactcgtcccccatcccccacgcagctggcaacccatcatgaagttcatcaatgatcagtacgagaaatacctgcaggaggaggtcaacatcaaccgcaagaagcgcatcccagacacccgcgtccactgctgcctctacttcatccccgccaccggccattcgtacgtccctgcagtgtcggcgtcctcatgctgggtgccctgggttccctctgtcccctggggctccccgacagtgctgtctgccctgttgctgggcacagaggggccgagtcgggggccgtggccaccagctgtgaagttgggggtgtgccgtgtctgaacctccaaagcctcactctgatccctacacagcatcctgcccagtccccatccttcagctgtgtcttggggagggagctgagggtcaggcaggccctgggctgttctggagcctggtggtctgtgtcctgccttctcaggccaggctctggcaggtggaatgggagcccccagcctagcacccttagcggtgacctgaccttctcgtctgggccctgcctcatgggacccctcggtgggtttggtgcgttcttaggcgggaagcacagagatcagtgctggccccttccagggctgcacagggctgctgttggccttggcaagagccctttcttcccgctggctctgtccgcacctgacgtcgcccccagaggtctgcaagggtgggaggctgtgtgtgccctggcaggcggaccctttgtggcctcacagaccctctgtcctcggcttgctgtgcaccccccgccagacacctgtggcccaccctgagccagggctgggaggaggtggacccaaggccagcaggaggggctggtggaggcagccgtgggtggcttgttggcgtgggtgggtggagaaggtccttcgcacctgctggcccagacgcacgtccctgggtggaggaagtccaggggtttggggaaacccatactctgtgggcagcaggtgcaggaaggagcctggctggtgggcagcaagcctcgaccagagtctgtgggaaaacccaagcccgagttttcgagcccaccctctggatcatcccctgtgggctggcaggagtccattcaggagcagggccagcttgctgcccacaggcctctcctgaactgaacatctaccctcccagggcagaacggcccatctggggtcccgtggtagctgttccagctgctccaagctttgcctcagctgaggctgatggcaggaggcagaagcccctcctgatgccagctgggcaagccaaggatggcgggcagtctctggcacttctgccactccccagcactgaccctttggctgggaccccagctgggcatgtttcctggtcccgcccgaggcgcccagtcccatgaggcaggggcggcccttggtcatctctacttaaacttctgcccggagctggattctccacagccatgtctgtgactgacttattctcactgtgggaaaagctctgctccagatctggggaagacagtgctccagttccagggccctgccagcccctgccacccacagctttccccacatcggaccccaggctcactggggccaagcaggcaaggggaggagcctgcctggtgcagggggagcagcccgcctggtgcagggggagcagcctgcccggtgcaggggcaccgcacactagtgctagcttctgtttctttggcctctcccctcccagccaaagccccacggcaagacggctgctgagccaatggcagcccctctgtgtggacacgtgggtgtgtggttgtgactccatggacgagggtgcttggagctggccctggtctgcctgccctgcacagtggtgtcacctgtgtctgggaaacacccttgtccttcctctgccccacactcacagcgtggccaactcagcccggggccccgtccttgccagcagggacccccgtgagccctgagccagcacctgagagcgttgacatctgcttggaggtgggtggccccccctcgctcccccagatgagcctcatgcacatccttctgcttcagcctcaggcccctggacatcgagtttatgaaacgcctgagcaaggtggtcaacatcgtccctgtcatcgccaaggccgacacactcaccctggaggagagggtccacttcaaacagcgggtagggttccgtctccacccaccccagcccttctgcacagcctggagacgctgcaggcctggcaggggccacccagtctagaggagtcacatggtcgggagaccgaaccgccggtcactctcccagcgggtggctggcctggtggtccctggcctgggtggctgctgggggccgtccctgagatggcctctccggctcccccatatctcaaaagcagctttgggggagggcccattctccagcagattctctgggggggttttggagaaggcctggaccaggcggatggtgaatctctctttcagggagtgaggccgaggaggggccgtgagacatggcccaccttgttttttgtctttttttttttttttttttttttgagaaaggatctcgctcgcttgccaagtttgcagtgcagtggcgcagtcatggctcactgcagcttccacctcccaggctcagtcatctgagtagctggaattacagatgcatacctccacgcctggctaatttttgtatttttagtagagatgaggttttgccatgttgcccaggctggtctctaacacttgggctcaagggatcctcctgcctcagcctcccaaagtgctgggattacaggcatgagccccctcacccggccctgcctggtttttattagatggaagagaagttgggccaggcgcggtggctcacgcctgtaatcccagcaccttgggagaccgaggcgggcagatcacttgaggtcaggagtttgagaccaactcacctgcagctgcccctgctccccccgggaggcacaagagttggaggtgattggggtcacagacccccagagcctgcccttgaccctgagcctggggcagctcagtgtggaggtcatgtggcggcaaacaccgggggcggggggcgggcagagcttgccacagggatgtgcccaactctctccctctatcccagatcaccgcagacctgctgtccaacggcatcgacgtgtacccccagaaggagtttgacgaggactcggaggaccggctggtgaacgagaagttccgggtgagtggatccacggggatgttcttcccaggggacccccagttcctgctgaaaggtgtggtggggggaggtttgggggaccttaagccatgagatgatattcttggggccagagagcactgagcccgggtgtctgtacctggtgctctcaggctgaggctctcgtttttgggggaccccagactcaaggcagctcctcccaggggcccaggaaagggaatggccttcccgcacatgtgtaaccagcgccatccacccgttccccaggagatgatcccgtttgctgtggtgggcagtgaccacgagtaccaggtcaacggcaagaggatcctcgggaggaagaccaagtggggcaccatcgaaggtactcgctgcgggcgccagggctacagacagacgggaaacagtccctctgctgactcagagcctgtgggccacgcctgagccggggacgagtggaacctcaaccactgcattgccccacccagagagaggggtctcctcgtccccactcaacccttgggaagtgagagggcaagtggcctgtgcgggtgcctccaccccggatctctccccgggcagggaaggattcggggagacaggagctgggacggaggctgccaagttctgggaactggtgcaggctctttcacgggcacctgtgtggccctggacaaatcgcccaacttctccgggcctagaaaaggggtgggccgtagctctgtgagccagatggaccctcggaccctcaccctgctgaagttcctgggaccctcacaccttagtctctcgtggctgttgtaaccaattagcacaaatgaggggccttgaaacaacacaaatgtattttcacagttcccgaggccagaggtccaaaagcaggggctgtttccttctgaggccctgaggcccagcctctcccatgccgccttctttctgggggctcccagcactcctggctgtcttggaaaggcattacatgctctaatctctgccccattgtcacagggctttcttcccggtatctctgtcctgtccctcctcctccttttttttttttttgagacagggtctcactctgtcacccaggctggagtgcagtggtgcaatctcagctcactgcaacctctgcctcctgggttcaagtaattctcctgcctcagcctcccgagtatctgggattacaggcatgcaccaccacacctgacttgatttttatactttagtagagacagggtttcaccatgttggccagactggtcttaaactcctgacctcaggtgatctgcccaccttggcctcccaaagtgctgggattacaggtgtgagccaccgagcccagcctgtttcctcctcgttgtaagaatgcctttggacttagggcctagactaagtggatgatcccatctggagatccttaatgaatctttgaagaaagacattttccaagtcaggtcacagtcttgggtaccaaggcctggaccttgaccatatctttgaatggatgggagccccaggtgggggggccacaattcaaccccctcttggtggtgacaccccgggagggatgggcccaaacgtttcctgcgctttcctctctctgccgcttcctttctcattagaatggaagaggggaaggtgcagagggaaatggagcaggaaaagccactttgttctggagagcacttggctgaaaggcccagtagcgcaggaagcacaagtctcttaatcttccagggcctcagttttcatcatccacaaagtgggtgcagtgtgccaagattttagtgagttgagagactgtcccaaagaccacgagagctttttgggaagctgttgctctaagaaaatggtcataatgacaattatcaggaggcatcaaacgctcctgtgcccctggcttcaatgagttatctcacttcatgccaagagctccccgcacccaccctccttgcagagttgaggaggtgctgtgagcagaaaacctgccaagggatccagaacgggaggcagctctagaatccacagctccagccctgcaccagactccctcgagatgggagttcatgcctggaggagggtgtggagaggcacgcgggccttttcccctgtctgccctgctcccctaccaccgagcctgccccacccaccccgcaggagctgcccagcagggtgcggcctgggtgttttccagtatccgcctgtgatgtcaggctggcttgcctccccttggcccctctgcctgcagttcctctcttcctctctgcccaaataattcttgctgtttaggaacctttttatgaaagacaggtttaggagagctcgggatggatgggcctgagatgggctggctgctttgctatgggcgtgcctctgctgcaccctggtgaccagccttgggtactgcaggtggctggtgacggaagctgtcaggaaatgcacaaggctggggtccctgcacctctctgacctgtgcattgttgcgcaccactggctccagctgaggaacagcctggaacctgtcaggacagttgtgaggtagtggggcccacattccagcagtcttatatgaggaccctggaaatgtgccttcaacactgatgggtttttatatcggggccccgtgagttcctagctgacctgacacccgggctagtaagggctctgcctcattcttgcctcccacttggtgaacagcacaagatgctgtatctttgccatccttagaaaccaccccaaatattgtcaatagaaatgtggggtgtaattaatcacgccatgaactcatttaatcctcatgtccctgagaggcgggtgacgttattatccacattttatggatgaggaaactgagggaatgagagtaacttgcccgagccagggagcagcgatcacacactgcaactccagcctgagagctccattcttcctgccggctctcgctgcccctcagtgttagatgagaatgctgctggtcagtctgcaggaggttctagtgtggacaccgccctacacagggccatggcaggaagggtctaggcaaaggcaactggcgtagcactgagagcacttgaggactgggcaaggtggaggccccggcccttcctactggcctaccaagtgaaaaccagacatttttaacttggggaaaagccatatggctctgtgatggggcagcctggagccgggtgtatgggtcctgaatcccgctccagccttacgagctgtggaactcagacagacacagttcttgcattctctatacctctataccccattttcttttttttttttccttttttttttttttttttttgagacgaagtttcgctctgctgcccaggctggagtgccgtggcgcgatcttggctcaccgcaacctccgcctcctgggttccagtgattctcctgccttagcctcccaagtagctgagattacaggcacctgctaccaggcccggctaatttttgtatttttagcagagacgaggtttcatcatgttggccaggctggtctcgaactcctgaccttgtgatccacccgcctcggcctcccaaagttctgggattgcagacgtgagccacagcacccagcctctatgccccattttcatcagataatggggataacaaaggaatcatgagagacacttgcaggtgtgtgaagatgaaattcatcacacgggagggcaccggtgtctttttatttgccttcctgcccggctccgcacctccagtgatgccattcactgccttcctcgttaaaaggccttctgttgtaacagttatacgtgccaggcactgtgtgttcatgtaggagttatgaagcacagcaataaaatgaccactttgagatggccaccagctcgagcccgagggcacttgtgggcacccatgtgcccagtctttcctcgtccctgagaagtgaccactgtcccgagcttgggcttgtgtgtgttatatgaagtacacgtgtccctgagcaatgtttagcattgctgattcttgagcttgtgaatggtcgtccacagtacgtagcccctgtgtgtgttgtccctgcgtgtgtgtgctctgagcgcaggcaaggtggacggggctgtgtaggtaacaccctgtgggccgcaggttttctttaagatcccagctctgattcttgcctcatcccattcccagcagcccagcccccttcctgtcttcaggcctctgctgggacgtcctgctctccctggtcaccccagtggtgcagggaaccggcgccctggcttctccactgtggcttcctcccatgctcctatttggcctggtcactgtgccatctcccattagccaggaactttctggagggcaggagctgagctgtccaggagcaggagctgatactggtcaccccagtatcccccagactgagagcagtgccaggtgtcctatactcagccgcagagcaggcagttcccctgccttcctgcccctggggcggccctcgggctctgctcttggcactagcattgctgggcagggggagagaggcggggtccaggcagagcttctccaccaggacattaaagccctcctgtctcctctcccagttgaaaacaccacacactgtgagttcgcctacctgcgggaccttctcatcaggtgagagacagcgggcttgggtggggctgacggctcatccctaagaggccctacagcgggtgggggcagagggtgtggggctgaagccctgggcagagtgggcacgccctgccacctgcctgccctgtccttgggaagatcttggaagcccgtcttctaaaaagaaaacccactgggaaatgaagcaagcagtgaaggtcttttttaatccccgcgaagttggctggatgggaaggctgagctttggtccactgtggcccggcccgttagagctgcccggtgaccactaagggcccagtgaggcctcacgtgtaggccccgtcggcagcatgggatgtctccagctccgaccccagtggcctctgacccctacccctttcacctggctgaggcttcttggctcccttgagtccgggcaaggaggggaagccccatgagagagggtgccaggtgggtggtccctggagtatgagccctggcctgggcagatgaatggggttggggacctcctgccagagtgccaggggctcctcagttcttcctcagcaagcaggtggcacaaatgatgggaatgttatcaagaggaggggcctccaggttggcaaggacagaggtggggggatgccgggagccgttctgccatcgtggggagactgggctttccaacttccctccaaaatattcctcctgagctgcagaggaatgaaaatctgagttcaggactttttttttcctggggacaagggcaactcagccctttgccacaggccatagccctggaggccggctgtcacccactgcctcctccctgccagcaccctggacaccggcctggagcaagaacgctccagccctgtccctctgagtctgtgcactgtccctgggccctggaccaaccacagggtggacccagagggagacacatgcattggaatatgtgtgtcctgaccgagtctgggcttaccagggggactgacccttccccccaaacgcgtaccagatctggtccaacgtggtgggcctgggggaccccatggggagccaagcagtggggatggggagtggcagggggtcaggcgggcctgagtctgaggcaggctaagcaggggccctgccccgctggccccgccccccacctcactgacccgcctgcccccgcaccaggacacacatgcagaacatcaaggacatcaccagcagcatccacttcgaggcctaccgcgtgaagcgcctcaatgagggcagcagtgccatggccaacggcgtggaggagaaggagccagaagccccggagatgtagacgccgccttgcccacccccgggatcctgcccccaagtcttttccgtcccccccaggccctcccactgccccattttattttatatgattttctccatttgtcatcattccccaccccttcgacatgctgccaggaaacaagggaaggggcctccctctgagtgagtcagtgatgagcccgcagcttccccaaggttgtggggaagctgtgctcgagccagaagcaggggtgagagcacccactgaattgatgtgaccctccgtccccaagcctggctccccgagggctcagaagagcggcttcggtgtgcagatcatccgtccgtgtgggcttctcagtgccgggggcctcggggttggggccaggcctcgcacgtgccgagaggctgggtgggctgcatgctcccctccatccccgtcggccccgtcccctggagtgtgtcagagcccaggggagaatggagcccatcgggggcacctggacccccgcccaccacgtagcgtggccatcactcagcccccacccccgccctgctcctaagggtagaaaatcccagggtcccctgccaccggctgcccagccactccaagccccgtggcagctgcccgtcctggagcagaaagtgccttgatctcagccatccgcaggcggctctgcggagacaggctggaatgagggaggcgtcttcatctccctgccatccccctctcatgccacccctcccacaaggctgcaggtgctgctgatgcgctgggatgtgattgaggataaaaaggaaggaaagatgacccccaccccctcatcccccagttttgaaaaggtccgagcaagtgagtctggtggaggagctgagggagggagccatggaaggtgccagaaggaaggctggcgggggcatgtgtgggcagtggcttgggctggtcagagtggcctgagctgcccggcggttgccctgcccaagtgaccagggaagtgtgtgtgtgtgtccacgtgtgtgtccgtctgtctgtctagtgtctgggtttggcccaagactgggctgtggttacattaatacccagccagccacccccgccactccccgctcctggcccaggccttgctgactctgtgacctggggaggtgggaggccaggcgagcctgaccctgttgtcctacccatgcctgggcccctcccctcagggcccatggtaacgaacccctaggaaggagagaccgggtgtcaggggtgcacagtccacagtgaactgaggagcgaggtttcatggcaacatggcccggcccctcaccctccgtccccacaacgggacccgtggggcctgcctttgcagggcacagatgaccaaagtcccttcctgcttcctgttccctgtcttgctctggggagaaagaggggcctgatgagactccacacgggtagacacatcaccaggtgcatctgcaggccccgggctggctgcttgcagccaggagaagggcagcgggagggagcgtgcgtgtgagtgtgagtgtgtgtgtgtgtgtgtgtgtgtgtgcgcgcgcatggaaatccgggcattggatgtctgactccctccccacccaagcgaggaaggacccctcaccacccccatcggcgggacagtttacttgccaacttgccgtgtttttgccaaaaccaagattttgaaggaaatgagtggccagcgccagggcccaggccatgtggcctgcccagcctcagcgtcactcggtggcagggtggggtggggggtgggcagcagcatcccagcctagagacgcttcactttccttctctgtaaccagactttgagaaattgttcatttcatcaggctctgttcctcaatggccttttgctacgtgcctcccaagaaatttgtctctttttgtataaatgacaaagtgttgaaaatgtatttcctgaaataaatgtttcaaatgcagaaacgcagaa

SEQ ID NO: 3 - DNA, 162665 bp, Mus musculus
cccgcccttcggcgacccggattagccacctgggagcccgcgccccgcggcctcgccaccacactttcctgggagcggcggccacggcggcaccatgaagaagtcctactcaggtgggcgccgcgcccggcgtggggagggtcagcaacggggacctgtgcgagtcacctgagcgctggtggccggagtgggcgaggccacccgggaaccaagtggctccggtagcccagacctccccggacattgtacccccagggcagtctagagcccccggcagtactgcccccttccacagatggggatcgtggggacattccacatcggagctctgccgtccccagtacttggctttccctatgctcagacccgagtcgctagggcctggaggaggcggatatgcacagctcttgtcctttgcgcggtagcgtttcttctgatcttgacttagttgtttcctttcgctgtcccccacagacctaactcactttagagtgtgaggggccgctctgaaggcgcccttctcgccctgcctgtggaatgtttgacttacaggtggtggttggccggcctggctgcagtctgggtcgggggaggggggagggtggaggggtctttgccttaatctgagcgcctggtggaccaggccccagtatcttttttttttttttttttttttttttggcggtaactcctgttagtcatttgttcagtggggcactggaaggtctccaaacaggaccacccaggaggtctgggccagttctttgggtctcagggtgctacaagtacccaagcatgccaacctctttaatggcaggtagagtgtcgtgtgtgtgtgtgtgtgtgtgtgtgtgtgtgtgtctgtctgtctgtctgtctgtctgtctactgggctttccaggggttctacactgatccttcctaagtacccactctgttactctgggcctccaccccaactgaggctgtgagcgcaggctaagtcaaccctgatcttacccgtccaggccggatctattgtccaactcccctaacttcacaaaccctctcttcaggttcctctcctaatctatctggacaggaagctctctgccaagaacctgtgaattcatttaagataagaactctgaatcaggagactgagttagagttgaagaggtcatttgggccattctcctgcctcgaggtcttgttctgtttcctcttgctttccaaattcaggaaccaaaaatgactctacttcatctcaaagagagccatttagcttccctttaaaaaaaaatagccttccgcagcagaagctcgaagttgctaacttggctgctgggcccccgtcactggcggtttttcaggagaacatgctgatgtgatggtgggggaggagggggcttccaggtggtatgtgctcaggtttggcactgggcccttctccctccccagcatgctccagatgtttggaatggttgcgggcattggggccatttcccagcctctctggctggcccggggatggacagccaagggctgtgctttcttctccttggtccttcacacttcctgactggtggatccggacactgaggtagccaggtcctttcagctcacaggtgcctggcttactgcacaaaccccagaccccaccaccccaagactggatgcgggaggggggggtcctgagcctggagcttcctggacatggtaggggtggaccagtgcatgctccgccatcttgcctatacccacccaacctcaaccaggtaaattttcgtaaaaaagatggaactttctatgataggtcctgtggacgtccagcttacagcccctgtaaaaccaagctcctcaattccccgtgtttacctaaaggggcagggctcttggaggatgggccacagggagggcctggaccgtatccagtttgttccctccctggcaatgcaccaaggggtgctgggtctgcagttgtacggggttgggtggtaggggttcagctccatgccaatttcctccgggtttcctggggccagccccattctgagtagggccactcgctgaagttagattgtccctaagcccccattgccaccagaaactcagcaaagtagcaaagaatgcaaaagatctctacagcatctgcaaacccaaggacagccagagagctttgtgcttttcccatagactgagtgggaatatcgctgtagacctatttatgaactcgaaatatgcagaatggctgccacactgtgatcagagacccgctgtgagcagtcctggccctctcaggacgggaggtgagaagtctggagtgaccccaggagcgcggtttatctgcaagcaccaaggacgcttcctgaggtgggcacccatagtcgggccagagggcgccaacgcagggacggacatgctcttagcttgcaggagcttgccttgtcactgaggaggcaagatatgggtgagacaccagctcattaccacccctgtctcggaggcaagacagtctccaagtgctctgggcagtcaggaggaggggcttgggactttggaggtgcctgccttctgggagtaagggatctggcacagtggaaaataaggtgggtcttaccaggtagggaagctgcaggaccccaggggcatttgggggaccctctggcaggcttaacacagccctgattcttcccaaacacgtcttcccctttgtttcagtggaaagctagagccgtgtggctcagtggttaagggcaggagcattgaactgtgaagctcttgggattaagtcccaagctgctgtagggactggggttcttcaccccacacattccattgttcaatgtggatggtgcttgtttgtgacggtgtgttttttacaggaacaggtccagaggtacctattctagctctctagccgctctcctaggaattactgccgtgggccataggaagttgtgtgcttcccactgcgggggcccagggcttccctgactccccacgatgtccgtggtttgcaggttcctttgtgctggagccagctgcaggctactcctgttgttttctggggtcctaaacgctggcttctcacagcatatgagtctcctggaatacctctcttcaatgctcttggctttcttggaaatcttcagtggcagaggccggggcgggggggggggggtggagggggggggcagggaggaggactaagctgtgagccaccagaattgggcaagcatatctctgtgtgcgttctggaattattttgggattcctgcggcttccaggagactctcgaagcaggtggctagcttttccagctctataccaggcagggattcagtcctaggggatacaaagcatgaggggtttcagccctacccagcattctagggggctttggaagggtgaggggcacaccctctgaggtcacttctgagtaagctacccacgagctggtgagtgtgggtgacaaaaagctcctttctccgctggtccctccatacctcagtgcctgctctggctacctctagactcctgatggtcaagcctgcttgctctagtgtatctaagggacgtgggctggagaggaagcagcctcctcaagcagttagtctatggctatgtcccatccttgcccagattctgaggcccctagtcccaagagagctgactgagcacaagtcaggaaccagcccttcccagaccactggggaggtgggaaggcaagttcagacatggacagccatccaccctgcctgcctgcccctgcctccttcccagctttccactccaaagcgtcttaccagcgtagcgttgagtaaaatgtaccagaaagagtatgagagagcccaccttctaccgtgggacctgcttacacctggatgggtgcagagaggcagagttgtcattcaggagcagctgtcttagtcagacattgggctgtccatgtgcccgtaggcctcccttggatgtctaaacaagaccatggaaggtgtgttccctcctgaaccctctgtgcccttctcagatggttctgtctgtcccaggctgcccgaggctccaagacaggcattgaacctggaggcgaccaggtttccgcatgtttgtccgtgggcagtgttgcgtgggctctgcaatttgctaaagatgtttttgataagagagatctagcccagaccagcacagagccaggccccagggtacatgctgagtggatctcttagtctcaggatgtcaagggctccgaagagagagaccctgggctcaaagggtgcttgggtagagaaaggggtgactcttgccccatctaaggcttgtttgttggggctgttaccttgaaaacatcccagctcttcactgctttagggatttatggggggggggggtcatcaggaccagaggctggtgaagctgcttggggcttgcaaagacagcaagtacagccctgctgtgctgaggggttcctagagagacctcagagtcctgactctgccacaggccatgtgatccaaaagtcccaattaagagaagtctaagccctggttgaaggcacttatagtgtcaggcagccaggcttgcagggttgttggtggcagcagcaaagccagttgtgacaggtgggcaggtctctgggatagctttgctctggctccagaaactttggccaggtttgccagaacagccatgctgagctgcaaggggccccgactccccagagttcctgatccgttttaattttccgtgtgctctgagccatttattccagaagtgtctgctgagtgctgctgagcctcaggctccattctggctgctccccgtggctctccgcaacagcactgcagggcccggagggctgaggggcaggctgctcccagcccagtttcttggccttatctctccaaccctgccctgggcccgggtccgcttgcagccgaagtgaagatgacaccaagctactctgaccagagaggggtggcggccccaggagccttgcttgtcagtggcctctagcagatctccaacaaccaagctttgtttggggactgatctgacctggttcgatgaagccttactgttggctgcccaagacctcaggacaggaaacgggagcacggaaagccaatcctagcttcaggtcgcaggatggcccttggacccggaccttccctggctgggacccaagtcaccagtcaaaccctgaccttcagcattgattggaatgctgaaatcaggggcagagaaggtctctgtggagctgaggcaacccatctgaccctggcttgaggatcccgaggagaggacctataggcttgcctgcctcctgcgtggcagttggtggctgcagtctctgccacagtggtcttttcctcactcctcccagggcatgctcacactctgactcccccagactacatctggagcaaagggtgggccacagcagcatcaggagtcctggagtgttatacccaggtcctcgccaggccaggcgtgttggggcagcagctgactcaggagtagtggcaaccgtgctcaggtttgagctgagttccaggtgagcatggttaccaggaagggctgggcaccagtgagctagctggctggctgcccggggccttgagctgagatcaatgggacttgcatcctggggccctcctttcacaaccctctttatagaggatcagatcccagccggaggataaggctactgtaacccaagcaacttggaagtgggttacatccagtgcttgtcatcttccagcatgctagggacttgaccgctgggcacagaggggtctggaggagttatttgtaaaactcactgataattaattctatatctttggctcagtagagcagagcaggcgagtggctaggtaaggttagagctgagggcttctgggtcatatggatactgcagggtgccagacaaaagggcagtcagatgtaccagggagccgggaggaatggtggcttctcaccagcactggcatcgcgctgcctccctgcttacaaggtgtggtaaaacctcagctatgtcggatgagtcactgggtggcagagcttcctggtggctgcgggccggccttaactgtggacctcggttgcctttattttatttgatttttttctcccctctggaaatgctttctgagacagaccctgtatccatcactttcgtttgtttgttttgctgttgttgcctgtggtcgatgttttgtgttgtggacttttccttcagcgatgcaatcaggaaatggaaccggaacataaaaccctacctgttgttagattcacttttatgtcccttgctctgcttgtccccacaagtgtgaaatgtatcgtttaattatctgagcggcacctgctttcagggttgcatgtccctgtcactcaggccctttcaccgggaagtcacataccaggtacgggtcaaagccagagctctggcggctcttcagagtggacgtcctgtgtttggtggcccctcacccgctttcctagaggatctggcccactgatccgtctagactgtaatggtgactctttggctattattatggctgtcacccacaaccaggaaagtatgctcaggatagcatttcatcaagaggtatgatggagagaaactgtccatcaacctgctgagtgtccctgcgctggtttgctgttgagaccagctgtccaccatcttcattccttgcagtgactggcacacgaggctggcgcagtgtgatctctccatccctgtcacctcccgagcccatgggcatggatcaatggctgcaggtgacaggctacctgggtcacttggcaaccaggtgtctgctggctggttactttgcagtgatttcttctggaagcttccttcctctggcaatcaggcatagttctctggcttttcctgagcgttaacattttgttcctctggcctcagtctttctctcatcaccctggtcgctccttccaggaactctcggcatggcggtcctctgcctcctcctctctatgaggaatccctgtgtggtaacccagtggccccaaggtgaagtgaattacatgttggttcccttcctgttgctgtgacaaagttcttaacaaaagtgtgggacatgtcatgttggttcacagtgtgatgggccagtccgtgtgtgcgtgtgtgtggggggagggtcatgatggaagctggagctggaggcagctggtcactcttcactcacagtcaggaaacagagggggaggtaaatgttggggctcagctcctgtttcttttatgcagcagagagctccagcctgtgggatcatgctgcctgcactcagggagggtcttccctccgccattaaagctctctaaaaaaacaatgtcctagacacaggcaggaagaggtacgcctcctctgtgagaccaagtccagtcaccttaacaatgaagatttgcgattgcagacccatactctcaggcgacttggggttctaagctagtgtgcttaaacacttaaaaagtggtgaccccctgcctctgtatgttgagtggaggtattgccctcaattttaactgtagtttgaaacagctattaagtatcgggaataaagcaaaatctagaaaagtatcaattaagccgttacttctccagagtaacatttttgtgactgtcttttggcttctcttcttcaccaagaccagtgttttattttctggggagaaaacagaaaagttatctttctgagtggtcagtatctttccttctccttctctttctcccctgcccccttatcttttgagtcaggatttgagaaagacttactttgtagtccaggctggactggaatttaaggcttccaaccttttgtaccaagggccaggatttaaggtatgcatcgccacgccagactgaaatttcatttattttggtggctgggattcctataggagaagagagggggatgggagaggggttatgtgtgcgcatgctccttcttgtgggtgtgcatgcacttgtgacgaggtcagaggtcaaacgagcattgtttctcagttagttaccaccttccttgtttctctgggacagagattctcttcctctcccctcccctccccccttctcttaattttttttgtttgtttgtttattttgtttgtttgtgtttttttccagacagagtttctctgtgtagcttttggctgtcctggaacttgctctgtagaccaggctggccttgaattcacatagatccgcctgtttctgcctccttagtactgggcttaaaggcctgtctaccactaccaccacacctaccccagctaagacagagtcttattcatttgcttggaattcccccattgatatagactggctggccagtgagtctcgtggattcccctgcctctgcctccttagtgttgggattaaaacttcttatgtgggtactggggatctgaccctatgacctcatgctatgcagcaagcaccttactcactgagccatctgcccggcccccagagtggagatttatggagggagagtgtgtagtgggtgcagtttttatgctgtcctggcagtgtgattccagtcaagagccagaagcacgtgagacatttataatgatcagatatgtccctgcccgcccttctgattagagctacatctctgactcaggctgcaggagaacagaaccctccttgtataggtttcccccctggcaattgggatggtttctgagactggctcctggctctgtgcatttcaaatcccgcccctccctactgcccacagttttctggcgcagagagcggcagaacatgctggtggctggtggctgtgattttggatcatgcacaggaggaggaactggatctggaaatggagagagaattcctggattccatttctacctagggatgctgagcagtaaccgagctacacacggaaacaaccagggaagccataaatgcagctaagcggtgccaagtggaatagctttctggctgagtggctcctgctgcagtccctggaccactgcttccactcagagctcagtgggaggaagtcctgccaccagatttcagggcctgagcctggctgtgggggacttgaacaaagggagctgctccattggagccagaaccatcaaggggacagaacttgttgctgagaacacctttcaaggcaggaagcaggaggaactccttggctgtcttttgtactaacacctcttactgattgaaaccagcttaaaaactagcagacctgagggccctgtcccatagcctgtaagaggtcagcttggtcacaccaaggagggcctggagggtcaacgaaggaaactctaggagaccagtacaggatgtatgaagaaaagctgtgtcctactgccccccactcagctgtaccccaacattgcttccctggtgtttgagcagcaggatggcctgcttctggtgtcagctgcctcaccccatctcggccactgctccctttctctcccacctgagctctctgtggagaagtaaggctgtaagcttggtctccagtctgtacggactgaattgtcctcttgtgtctcagccactgttgaatggctctgaagagacaccagatcgagtcaactcttataaaagaaagcatttaaccagggatttggttacagtttcaaaggggttagtccattttcatcatggtggggaacatggcagcccacgggcagacatggcactggagaagcagctgagagttttacatccttgtccgtaggtagcaggaagagacactggacctagcatgggcttttgaaacctggaagccttgtctcagtgacacacctcctccaacaaggccacacctcctaatccttcccaaacagttctaccagctgggaaccaaggattcagatatatgagtctgtggggggccattctcattcaaatccctcccccttctcattcaaccacacacacacaccccttcccctagttccacagtgaagtcttaattctcaatgggatggtttggatatgcaatccatggggaggtaatacagctgaggcctgagcctggagaactggcatctttatgagggggagggggcagcagggtccacaggaaaacaagatgacaaaggcttcactgagccaggccttggtggggcatatctttaatcccagcacttgggaggcagaggggggcagatcttagtttgaggccagtctagtttacagagtgagatccaggacagccaaggctatgtagagaaaccctgtctcgcaaaacaaaatagaaaagggctttgctggaaaccagttctagctgcgtgcttgggctcctgagctgtggggaaatggagttctgttacccacactctgggggtcccactcacttgagtacccgagatgctttctgagtaggttgtgggcgtgctatgaaggtcttggtccccacagaactaggcaagagtgactctggtatgggtgagagttcatagagacttccagatgctcactatggagcaccatggtttggatcgtgcattaatgtcttctcccttccttcctccctccctccctccctccctccctccctccctccctcccttcctcccttccttccttccttccttcctccctccctccatcccttccttccttcctttctttttttcttgctgggtggtaatggcacacacctttgatcccagcactcaggtgtcagaggcaagtggatctctctgagtttgaggccagcctggtctacagaatgagttccaagacagccagggctacacaaagaaaccatcttgaaaaaccaaaacagggctggtgagatggctcagcggttaagattgctgactgctcttccaaaggtcctgagttcaaatcccagcaaccacatggtggcttacaaccatctgtaacgaaatctgatgctctcttcaggggtgtctgaagacagctacagtgtacttacatataataaataagtaaataataaaaaaaagaaaaacaaaaattttaaaaattctttttagagacagaatcttactctgtagaccaggctggcctcagactcagagatcttcttgtctctgccttctgatagctgggactaaaaaccaagtgccagcatgcaggcccttttgcctatgtagcccagcctggccttgaactcatggcagttctccagcctcagccttctgagtgtggggaccacaggcataagccaccagcttaactattagtccatcttgcatttggataatttgcatattacaaatttgcatatggctttactacactgttgaattgactacagtgtgatagtaacagcaagcttcccctgaggctaacttgtcgtgcttgttggagcctggcaactggaaggtcatgagggcgacggtggctactcagtggactagaacactaaccatgttctgggatgggaggacttctcagacttccacgggagctttctctacacaggtccctgatgacagggagaaagatgcccctgccaaactcccagagcagaggttcttgcctggggtgtgagtgtccctccagggatctggatgacctgggagatgctggtcacaggagccaggaggcgctggcctttccattcagccatctctcattctgtctagctgtttccagtcttatttccacatcctctgctactttgggtgctccagggtgacacacaccaactcccactccccccaacacacacacacaccagctggctttagagacttttggtctctgttgtgtttcagtggtcttctggggacagggcagggcctcctgagtgggctcattgggctgatttctggctttgtggctcttggtggccattcattgctggcccatacagctccacattgatctgcaggcttcaacctttcacctccttccttggtaaagtctgccttctggctactaagtcaaggtgttgataaatgaggagtaaagaagcaggcttttttttttccttcatctgtcagctcccagcccgccgcatcctcaaatgggttaagtttgaattcttgaggagtgatgcctagaaccagggccatggctcagttggtaaagtgcctgctacaagcgtgaagacccgggttcaccagcatcacataagaaagccttgtagtgatctgtgcctgcaatcctggtcctgaggaggtagagaggcaagggaacccctagggctcactggctggtcagactaaccaatctggggagcccctagtcccagtgagagatcctgtctcaaaaaacaaggtggaagtctcccgaggagcgaggtcatcccctgacatgcccatgtgcacacaggaagaacctgtttgcagtgtgagggtgacgcagcaaacatttggggtatactgacttacacctgacaagccttttggctcacacctgagatccaagttctgtgacgcattttggagagcagtgagtccccgacagccactggggtgtttttgaagaaggctctgtgggtccttgggtgggtactaacgtcacgtgatgggcttggccatctcacagttggaatgctcgctgccctgtgaaggccctgagctgtcttcctcatctgtgtgtcagatacctttgctggctggacactgcgcaagctcccttgtatccatgtctcccagcgtggcgtctggtgcagcagcgatgcttagtaagtgtcttcatgcatccacagcttgttgatatggatgttgcagtaaatctccaaccccgataagcccgcaacttagttaccatatttataagctgcacgcccacccagatcgggcagatagaccactacactactctattccccagctaggagatctcttgtacttgtggcttctccgggccatgtggttctgctgcatcctccttccacctcctcttcctcagtcttctctgactcttctccctctccctccttcctctctttccccatctctaaaatccccagcctcaccttttccttccactgcccaatcacaagctctagcctttatttgaccagttagaatggggagaaggctcacataaaatcatctgagtacttggtcccctcctcagggcagcccctctcgaggaagccgaattaacatcaacatataaacagcaccagggcaatccacaatgtatggaaactgcctccaacagctaaaaaatatccagacagtaagagctacaattcttcttcttttttttttttttttttttttttttttttttggtttttcgaggcagggtttctctgtgtagccctggctgtcctggaactcactttgtagaccaagctggcctcgaactcagaaatccgcctgcctttgcctcccaagtgctgggattaaaggcgtgcgccaccacgcccggcaagagctacaattcttaactctagcttaggatatgcaacactgactccggggtgggaggtctggtcctacagctgggcccccatggtaagtcctaactaatcctggcagactaaggaccctttacagagacagtgcagcacctccgtttggttggcattttgtaggagaatgggcttgtctgcctctcttagcctgtcggacaggaagcaggccctccactttatagagtaaatagataaaggacagagatttggcttcaaggccaagggctctctgatgatactgtttgatctgtgccacctccatccccagcccctactcttgtggaggaagaaatgaaacttttgagccagtcttgctatagaacaaggtcctccaagcaaagcagccaccatcgtcaccagttcagcttgcagtcttgggattgcaagaaggcctgttggctcgggacctttcctcacgggaaaggacggggggtggggggggtgtcattggaccttcagaaattccagctgcccttcccagccatttttatgcaagtcagccctaattttgagcgccctcttgcttggtggggcggtgctggagtatatagactgtgggaggctgacagggctctacctgtgaaactctagggaagccatcctctgtgctaagactttccatcgaggctgcttcggggtcacttacactcctggcagtaactctccacctaggctctgtaactaaacccaattatctcactcggagctttgtcactaagacttaccaggaagttgtctttcgttttttttgtttttttttttgttttgtttttttttgttttttgttttttgtttttgcagatgtgctggtttgaatgagaaatggccaccatagtctcaggtatttgagcacccgactctcggtcggtgtggagaggtgatgaggaggggcagccttgctggaggaagcataccacacaggctacctttgagagtggaaagcctcgtggcccattgctctctctgcttcttgctagtggttgtgatgtgatgtctcagcttccccatcattatggaagtctttgtttttgagagagggtttctctgtgtagacctggctgtcatggaatgtcctagagtttgcgctatagaccaggctggcctcaaattcacagaaatccacctgcctttgcctcctgagtcctgggattaaagatgagcacctctaccacccccattgtggactcttattcctctgaaaccagaagtcaaattaagctttcttccttaagttgcttttgctcagggtgttttatgacagcaacagataaataatcaatataccagggaaggaattctcacaaatccacagccagagggtgggcagaagccctgtgctgggtaggggcctcttagctcagtgcctgctgcagataagccctgactgataggcctggaatccgctctcagggccacctgcagccttcacacctcacacctgcagcaaacagctgacagggtgtgtgtgtgtgtgtgtgtgtgtgtgtgtgtgtgtgtgtgagagagagagagagagagagagagagagagagagagaggaggggggagggagagggagggagggagggagaaagagagagagagagagagagaggaggggggagggagagggagggagggagggagagagagagagagagagagagagagagagagagagagagagaaagagagagaaagagagagcgctggagccctcacaccaggccccaagaggaagggactcctgggatgaggtcagctggaacccacctggcccttctccaaggattttcatgagttttaagaaaaaaacttaagctgggcgtagtgacacctgcctgtcattctaaagagactaaggcaggaggattgccatgagtttgagggtcattgtgagatgcagaatgagtcccaggcctatctgggctatgaagggagattctgtctcagaagagaaagacagagcagagtgtggtggtgcctgctgctagtcccagacctcaggatacaaaggcaggaggatctgagttcaatgccagcctgagctacacagaggaaccctgtctccaaaacaaacaaacaaacaaacacataaataaaatttaaaaattgaaatccagttttctctctgtatacagtgtcttctccacattgggaaccgatatgtgcccacggtgagtctgtttggtgattgacagctcacataaagccaggcctggtagtgcaggtccgaaaccccagcagaagctctgggagagtgcaggccagcaagcctggtgtagagtacgtgatcaagagagagtctcaagcaatggagaggacagacacccaaggttgttctctgacctccacacaagccactgtggcaggagtcacacaccctgacacaaatgtatatacattatgtaaatacataaagcagtaaataagctcactagaagtccctcatgcctctccctttaccccagctcagaagcatggggggctccatcaaagtgaaatcctcacatattttttgagataggagtctcactgtctgagtctcagtgatacagctaggccatgtggctgttgagctcctgataatcctcctgtctctgcctcccctgtgattcgtgcacgcacccgtgggaaggggatctgaactcaggcttgagtagcaggccccttaccagaagactgtctccctactttgtttatttttttattttcttatttcttttggtttttcgagacagggtttctctgtatagccctgactgtcctggagctcactttgtagaccaggctgtccttgaactcagaaatccgcctgcctctgcctcccaagtgctgggattaaaggcgtgcaccaccacgcctggcttatttgtttatttttaacaggagcacactgtgtagccctggctgcactgtgtagcctcagagatccacttacgtctgcctcctgagttctgcgattaaagatgtgcaccaccatgtcctgcactcgtatcttgctttttgggacaaggtctctcattggcctgcagctccctggtttgatgaggctgcctgcctcattcagagagcccctaagtctgtctccacctgtgctgggtgacaagcatggaccactacacttggctttttgaagtgggtttttgggatcaaactcaggtcttcacgcattttacagatcgagctgtttctccggcatcccctgcacccttgtcactagatattaatagcccagaggaagactctcactgtgtccctctgacctggaagctctaactggatgaagtcagagccagtgcccgtgaggtatcatctgcagccgggcctcagctttagaggacttgggttgtttgctctgggctggctgcagatggcagggttttgtgtgtcttcttccttctggatcctctttattttagagtcacataaaaataactcaattctctgctggatcacggtccttggctgccttggacacaggcctgtgggaggaagtccaagctagtgcgtttgagcatccctggtctggggctcttctcaggaccatgccaagcctgggataccagggatccccagccccttctaggtggtggagtctcctctacagcttttctggcagtgcaacctggtaaggatgcctcttttaggaaatcagaaaaataaatagtgtaagaaaaatgaaaactttgccccagaaattcaaaaacaatgctgttttcccagttgggtttggggagaaggcatcagatgcccagggtcctttaacacacttagatcctcttgcatttttgtctgaaaccagagggcaggtggtgggtgtggctgttcagctgcccagaggcaggacagggcaccctctgtctccagcatccctgcaaagccatctcatccggaagtgactcaggccacaggaatgttcagtgctgccttttcttgttggctgttcctcaccccagtttctgttttggggactgtggtggtttgaatatgcttggcccgaggagtggcactattaggaggtgtggccttgttggaggaagtgtgtcactgtgggggtgggctttgagaccctcctccttgctgcctggaagacagtagtctttgtaagagttgtgttgatcatggtgtctgttcacagcaatagaaactctaactaagacagggacacagtggacttggggacaaaattgctgttcactagtactacatggtcctggtatgtgcctcttgtgagttcactgtatacaaggcaataggaagggatggggtgcctgcgttcatccacagatgcagtgtaactcatctggtatgggtgtgctgctgctgaggtgcccatactatcctctcccctcagcacactcagcagaagaaggcctctgctccttctccacagccctggccagctcacctgagtcacactcctagtccagagggctgggtcaattccaaggaccagatactggctcctcataacccccatctacctgtttgagaccctcctccttgctgcctggtagacagtagtcttctgattccatttggaacaaaatgcagaactcttggctcctgcaccatacctgcctggaagctgccatgctcttgccttaatgataatgaactgaatctcatccccctacccatccggtcatccacgtgatcatccatctacatatttatctatccatccacccacccatccacaccctgcttatcctttggttcaccacatccatctacctacccaaacgtcctcctcctggtggacaggccaggaatttcagacaagtaggtcagtggttgagtggacgggtggttgggtagatggatggatggatggatagaataatgcatgatggatggatgagtgtaagtgtgcaggagtctaaagagaagccttcccctttgactaataggctagatgtgtatcaggtggtggaggatacagggaagtatttaggcctctcctaggtgatcgtcttgctgttggggttgggagagagagcctctctggcctaggttggggtgttcttgtgactcgctgaaggatagttgtgtggcatttaagtgggacactccctaaacaccatgacctggttgtggtttgcagacacatgggttctcgagtctgatcttcttggcagcccatgggtgcgctcagcttagcgccttgcaaactcctcaagttaggacttgcccaccacaagcctctcccaacaggggagtgccagccaaggggcacgtgtggttggaggcagagtgtggcacgagactgagctgatccagactctgcctgtgccccctcttagggcagagagagagcagttccctcccattttcctcaatgtagcccacttttcccagtctttggagccatagaggatggacagggcttctggctcatgtgtttgggaaaccctgtttatcagatgtgggtcttaagtggtaggtcctggccaagttctgtagacccagatgactcctctccatcagcaatcaatgctgtgaggatatttaaggtgaacccagacttggcctctcaccaccggttcagtttctggttgttgtgtggccctaggcaggttacccagcccttttgagactcggctcccatatttgcacaatgggtcttgtgacagctgtgtgaagcatccaggtgggtggctgtcatcattcggagggacaggtggctacctgtctggggttatttggttctgtagcccttggcaggtgtagaagtgggaacgcacccaatgttagccacccaccaggaagggggagcctggtggccttgtgtgaacttttccccttgtttctgttcttaggagtcacacggacctccagcggtcgcctccggaggcttgcggatcccactggcccaggtaagcagcttgagtttcatctgcttttgagacctgactttctgtctggctttgagtggttggaagcctttgctatgacgacctttcagtggtttgtacagagtatattcctaattaaattaataatttgtttgtaattgatagctatgcaaatggaccattctggaccaaccagggccgcccaaggctccagaattctaagcactcctaaggcagtgtctctgtgcaggcagccaggcttgggtctgccagagaggctgcccacctttgcagagagcaacctcaaggcacaggagagagaagtaaggaagtaggcagggtagggggactttatttgcagtgagtgaaccatagcagggtgtctttggtggcccattcagcaatgatggacagctccatcagtgagtcatctgcattgggaagggactgtcatgcactattcctttgactttggattttctctagtaaccaaagagaggagccaaaacttatcagagctccagggtcacttgggggttaggggaatccctccaaagtttgcaggaggctctgccagcctcagggtccaacctgggcaagcgccagaggctgcctctaatgtcctcggcagggcctgtgtgtcttctcctgccaggcatcctcagatcccgttgttgctatgagtttttacaataccgctttgtgctcccagaggaacacacccaggagctatctttgggtccacaaatgaaagacacacacacagacacacagacacacacacacacacacacacacacacacacacacacattagcttattgtttaaatgcctttgctacctcaatgactgggcacgtctaaaccttcccctgctaccccaggcccaatcggggaagtggccagtggccacttacctgaagtctcacatggctgattggctttatttcctgccgccccggtgtctcattctttttccccaagtcatggcaatcttctgtctcctttttcgcagttcctagcccacacaaatctaaaggtcccaccccatctccctttgcccaaccattggccattagcatctttatcgattgatcaaaaaccatctgggtacaaggaccttcagcatctggtcacacagattcccgatcgaatcaaaacattggaagcaatctccaacatcccaccatgagcttctccatccccagagtccttctgtcatttctgatggcccttctaataccagattgagggatctgtgctctttttgatgacccttgtttggagatgatgttggctgccaggaatgaaggggcctgctttcgtagcaaatgggggacacgtgctcgcctgtgcatgtatattggaggccagctgggttgtacagaggagtacatggagacagaatggtggacaggggaagcagatgtcatgagacactaaaggaaacccacagtgacaaattgtcatcaggactctcacgagagccaacgtctccagtcccagccatgcaggaggactccttccagtcagggagacttcagagacaagggcatcacatcacctgggcccactgctctctagccctgccctgtccagaggaacactttgctggtgggaccctctatctctgtacttgccgggagggtggcctgttggccaccaaaacagagactttaggtatattttattgctgagttgtttgcacagatttgttttcaattaaactcataatttgtttgtaatttgtagctatgcagatggaccattctggaccaaccagggttgcccaaggcaccagaatctaagcattcctaaggcagtgtcatgtctcctagctccatcttcaggatgtggcctggctgaggtggctggctctttgtagggggcaatggtgacatcgggggtggtatgggtttatcgagtgtgtgacgtggatagtgtgccaatgtggcactgggtttagcatgtggctgacgtggtaggtactgtgccagtgtgctcctgagtaccatgtgtgaagagcctgggtgtcagcagaggagggggatgcccccgctggaggtggttagactgctgagtgattcagcactcttggttaagacgcctcctgcccaccatcgccacatgagctactaaccactagccagccctgccactagtgtgttcggatgccttgtgtttgggatccccccctctctcccctccttcttattggccagccttgatccaaagggctggagataggtagcatttgggggttcaggtctcggagagctggtacctcgggctgcgtgcatgaggtctcctgctgttgctaccccaggctcaggcccgttctgtgccgtcagcacttggcagcctgggcttgctcagcttggaagcctaaggcataatttgcaggagcccaaagctgtaagcagtgatctaggtttgcatggggcctgtctgctgacacacacagtcttccccagggcctctgctggctcccatggggcactcgttcttagtcttctatttcatctaaggcctgcctccctgctgccatgaccctgggatgtgttccctgccaggacctaggaccacacttggagctcctctttgctcctgtcttcctccccgccatggtcacatggtctcctgtttggggctccctgtttggggctcatccctagggagaaatagggtacatgactgtcaggtccactctctgttctttccaagctgtttgggtctgggtaggaataactattcagggctcaagccaagccccttagctctgatgacagccacaacaaagctttacattctctctccctctccctctccctctccctctccctctccctctccctctccctctccctctccctctccctctccctctccctctccctctccctctccctctccctctccctctccctctccctctccctctccctctccctctccctccccttctccctctccctctccctctccctctccctccccttctccctctccctccttctctccctccttttctccctccctctctccctctttctttctttttatttttgtggttttaggaatcgaacccagggccttgtgaatactaggcaaaagtccaacactgagcctattaaaacaataacaaacaacaacaaaaactgggcatggtgcgtcacacccaataatttctgcacttgggaggctgagagggaagccttgccttagcctggctacacagtttcaggctagcatgggctacaatgtctcaaaaacaaaagtcagcaaaataccccaggcccagctgactggaggtgcctggctgttatcctagcctttgggaggtagaagcaggaccaggagttgaaggttgtccttgcctgaatagtgaattcaaggacagcccgcatgggtgatgtgacaccccgcctcaacaaaacgacaggactgatagagtatctaacataaggattaagatgataatggaacagagtggcccaccagccacctctagccaagatgctgcaggctaaccaagcctccagggagccaggatgacccgaggacctgaaatccagcctgagtttgggatatctgtgggttttgcttctgaacaatctacgttccccaccccacccccaaactacgagcttgcttatctcacagcatttagggtttatgttgggccatggagccctcatgactttggcttacgtattcctcctgggaaccggaaagctgtcacatcttggcctgtgggctttctctgctactgtccctgctgggacggctcttctgcctgcatccttaggtggagggtgggatggacagatgcccacctctgtccttctgggcattgccaatgtacccttcccagtggttttctggtctgttctcccacacttacccccttcctataccccaagtagcctgtttgaacagactgcggccttggttgacctttgccctggttcccacggctcacatggcatttcctgggctgaatctgagcctttctacctccagcccggagtccctggagccttctatgccttttcgacatccggtgtgtgcttggggcccacttctgcctctgaggtctgtggctttgtccctaatcccaccattgactcatctctaggattccgatgaccttgtgatgaggttatctggagctcccaagtccaaagtctgacatccttggaactagaggagaagccacgtgaaggtgaactcagagcagagcctagagctatatagcatgagccacggatggcctaagaggccaggctggccctccctcggtgctgtccagaaagtgtggtttgccaacactttgatattggatgtctggcttcaaagccatgagagaagccagctccaacgtgtgaaatacgttgatacagaggtactcagacacctccctctgcctgtcctggaagatgcccttctcacggaagggtctctctataatacaacctagggagactgatatacgacagtcccccaacttctgtgtcctgccttcctcggctggtgcccccggcgccctttgatttcttacacacccctttgcatacggcccttcaaggaagcctccctactcccgtgaaccctgggcttaacactgtgactctcatgtgtaactaattgtctagctgctaccatccttagtaggttccaggtctgtccagtgtcctgttgtttcctcagggccatgtgtcctgctgtcttggtgggaggagctactgtggtagtgagtgttgacagccagagaccctgtgccagaccatgttaacaatcgtgtcacagggagggaggggccttgcctgggctcctgtgggcatctttggctcatcccttcagctgagacccactggctcccactccagctttacttcaatgccccggccttatctcccgtcttagataggttctgtcactgtgataaacactgtgacaaaagcaacttggggagggaagggtttactcagctcacagatcacaggcaagcacagaggcagggcagggcaggagctgaagcagagcccatggagaatgctgcttactggttcgctcacacagcctgatttcttatatacccaggcccagccgcacacagtaggctcatccctcccacatcacaggccagtctactagagactttctgtaaatggggggtcccctcttcccaaccaggagaccacctgcccaaaccctcaaggcaatagtctcccattgaccttgacctctgcctcttcgccccacataggtcagtccttgtctctctaccttctgggggccctggaggaggcaaccatgatttgggccatgttgtgacctccgctgtctcctcggttttgtcgtgtctgtctgtctgtctgtccttgttcttcctcttgcaggttcttccctgtacatatgatgggacatttaccatgtcctacctctgtaccagggaccatgctatggtccaccccccacgtgtgcacatgcacacaggtatgtacactccccaatagcattacctttgcttttgaccctcaccacctcagaactcagctcagctgttgatgcctccctgtcttgtccttcattcctcccccatccagcattccccaaccccacccagccccctcacctttctggctagcctgactccctttccctgggctagcctgctctcttcatctctgaaaacagcttttctgtcctgctggttctaagtaggacccagagcagcacaggctggccctgcctgtcatgtctagtgagcaggttgcctttctgtcttctttgcaaggggcccacggctggcagcaggcattgtaggaccggatttggtagaagcaggcgggactggccaaagaaccagtttcaaacagaaatagcacacttcttttgctttaaccaagaagcagctgtttgtcctctggggcagaaggctatgggaggagcagagggaacagggtttgggtagctgctacccgccaggcatttaggactatttaaaaacatgtctaattatgtgtatgtgtatggaggtggggtggggctggtatgtgaaggagggtaccatacctgtgaaggccagaagagggcgtcagaacccttggagctggagttacaggattgtgaacctccgaggtggtggtgtgagtgtgtgtgtgtgggagggggcaaactccgcagtacccatctgcccagcccatgactgtttaaagaagttattctctgtgtatgagatttgctgcatgtgtgccattacaccatgtgtgtgcagtgccctcaaaggtcagagagggcatgggtcacctgaaacaggagtgatagatggctgtgagccaccatgtgggtactgggaagcaaacccagggcctcagctagagcagccggtgctcttaaccactgagccatctctccactccatcgtcccccgccgtccaccatggacttctgtctgtctgtctttctttctttctttctttctttctttttttttttttttttttttgggtttttttgaaacagggtttctctgtgtagccctagctgtcctggaactcactctgtagaccaggctggcctcgaactcagaagtctgcctgcctctgcctcccgagtgctgggattaaaggtgtgcgccacgacttgtgtttttcaaatgttcacgtggttggtttatgtagcacaggctgccttcaaacccgagatcctcctgccttagcctcttgagtgcctggattacaatgtcaattcggccaacatagtgggaagccttgggctagcggctcctcatggctgattcctggtcacgtgtgtctcccatgccatgcgaggcagatggagcgcatcttcttcaacggcgagtgctttcaggaggtgctggtttggactggctgtgtgctgcagtctgagattcattgtttatcaagcaaatattcatggggtgcctactgagcaagcagagggcaggctcctcgtgggaagtagaagactcccgggctgcacctcaactccatctcccttcagttcctgctctgatttggctgcagcctggggtgggggtgaggggtggggtggggtggctgatggctaagcctgaggacctttagcgaggaatacaggccatctgggctgcttgtccctctggaaaggaaccggtgtatcaagttcaggtgttggcctctctaaactatgccacagacctgcctacccacccacccacccacctcctcaccctcccacccaccccatcccaccccaccccagcacagaggagctggcccatgtttacttaggaaggcagatcctgaggtagaataaaaggccaagagaagcttctagataggaatgttgcggccccaggttggaagcagcttgctggggaagctacagaagcccagccagggcctcttccggctgcccactctgttggcaggtacattagctggggcagccaggccagttctgaggcggcagcctgacggtctttgtttccatttcagggactttgatttaatgttctcagctggaagtgaaagtattacctatttattagtattattatttttgcacagaccctcactatgtaaccctggctgatctacgactcactatatagactaaactgggttcaaatttactgtgatcctcctgcctctgactcctaagggatgagattataggtacgcgtccacatacttgatttaggagatttgtgtgtgtgtcctgtgtgtatgtatgtgtgtgtgtgagtgtgtgcatgtgtatgtaagtgtgagtgtgtgtgtatatgtgtatgtatgtatatacgtatgtgtgtatatgtgtgtgagtgtgcgcttatgaatgtgtgtgtatgtatatgtgagtgtatatgaatgtgtatgtgttgtgtgtatgaatgtgtatgtgtttgtgtatgtgtatggtgtgtgtgtgtgtcatgtgtgtgtgtgtatgaatgcgtgtgtggaatatgtgtgtgtgtgcatgtgcatgtctgcctgtacatgtggaggccagattataaccttggctgacatttatcaggtgcccactacttttttgctctttttgagacagggtccttccctgtcctggactaaccgattagtctaggctgtctgtccagtgagccccagagatccttctgcctctccttcccctgccctggggttacaggtgtgcgccatgcccagccttttcacacgggggattaagcccaggtccccatgcttggaagacaagcgtgttattgactgagctgtcacaccactttcccaaatgtcatttgtaaaaacgtttatttctagagcctcataacttgggtgtgggtgttcaagggtctctgccttgagggaaggaaggtgtacagtggcaggaaatcagcccagaggtgtagcatcttttcctccagccttccttcttccctcctccccaaaggaccttccccagggagtacaccaatatccctgtggagccttcagaacaccttttcctgagtcacagagggcggatttttccttccctgttctccctgggatcatctggccactgtcagctgaggctgcctggcctcacttggtacagttttgcccctgccccagccaatgctggggtgcagacacatgcccctccagagggggtccatggagccaggatggcacggtggcatctcagctgcgcatgctgcaggatgcagttgggaaaagttccagtgacccatggtcccagctcctggttgctttgtgaaatcacctgtaccttttcctttggctccatagaagtagacactttaatctggggacctgatcaggagaaaagctcaccaagaaagcttcaggggcagaaacgtctgggagagccaggtcacatcctgggacaggacagagttggggaagcaatcctggaaggctttctaacagaggaggtaatgcctgagccctcccaaattaaaggttcctgacttgcctaggtccccagctgcttctttaagtgggtttgtgcccagggagccccctttccagcttggagggattgtgaacctgcgagagactgtgaccagggtgtctaggtcaccggtgtcactcagtgctggatgagggctagggtgctggcctgaggactgggaagggctgatgataatggggttctaactgcaggctgggggtgagaattggggctttgggctggcacagccagatgcttcagagtctgggcctgggggtcctgtgtccccagaagagcaaaccttatccaggtttggaaaagctgttgaaaccgagctaaccctcatgtgcttctgtttttcctgagtacaaaagtctcagcctcttgctgagtgggaggagcaggcgtggctgttgagttgtctcccaggcctacacgcaccgtgggcagtgggtttcttgactctcgcagctggggcctgccctgcctctcaccctttctctccgcagcttctgcctatgactaatgcgggctccatccgagccgtctgtactgccagggttttagtttcaaattattcccctactacccgagtgcttagatttttcaggcatggagaggagacagaccttgagccaaactaggtccttcaaatgctgagggtcacagagaccccagcaggacacctagggcttgtgcagcctcgtgtctgcaggaggcaccagctcctggcccaggcctgctcatcatcccgaaccactgatgctcagggtctctcaggtctttcttgtttgcatgctgccctgggagctgggcctggacagtctcatgtgggggaaacgatgtcttctttcctccttttttttttttttttttttttttgtacttactcaatgtaatagaatgaacagacattgcatttgtaagcagaaaaaccatcaaggagtatttttctcaaagtcaagaaagagagtaaataaaaccaggcctggtggtgcctgcttgtgatcttagcacttgggaggtggaagctggaggatcagaagttcagagttgggtggggaagggggggagagaggggaggctgagcgatggctcagtggttagagcacttgttgctcttgcagaggaccctggttcgattcccagcaccctacatggtggctcacaaccacccataactgcagatacaggggatccaacgtcttctggcctgcttagacacacaaagcacacatatatatgtccagacaaaatactcaaatacataaaatttttttaaaaatatgaaaaacaaaacaaacaaaaactaactaacccacaatgtccagtcaccctctgctgcagggagttatctaagatcctgtttcaaaaaagttggagaaaaatggaggagagaagaaagaaaagtaactgcaagccccagcctgccccatctctcctcctcctgattggtctgcctgctttagatgcaaatggccaaatggccacagtgttcattttggcctgcacaggacacctgcctcttgttccccagaagaagttaccacaaactggtgagataaaacaatacaaatgtatctctgtcctggggccacaagtacactaagtatcattgcggatgtgtggggctgtaccctccagaggcccaaagggagccccttgcccacctctgccacctgtgtgggactccaggcgttccttggcttgtggccacaacagtccagccttccggcagtgccttccactctctatgatctggcctcacttccttccgtatgtgtgtcaaagtccctctttttaaaatataccccctcaccctaaggaaacaatccagacaggaagctattgaagagggtccttaaaaatcatgataaagacgccgaagtgtagctcttcacagttgatggcttcaggcaggaggtggggtgaagagaatctcattttgttttttttaaagggctggccactgggaatttgaccatactctagtgagtttgtgggcaacataagttggacttggttgggggttttttggggggggagggagggtgtgcaaaggaagggagcatgattggggtacattgtacgaagttcccaggtaattaatacaaatattatattgggaatgatacaaatttttattaattctttgagagtttcattacatgtatttagatcatagtcacttccagttccttcccttaactgctcccagaccccccacctccttaccctcccaacttcatatgctctctctctctctctctctctgatttatttttattttatgtatgtgagcacactgtcatggtgtcttcagacacaccagaagagggcatcagatcccattacagatggctgtgagccacgatgtggttgctggacattgaactcaggacctctggaagagcagtcagttttcttaacccacccctctctttttggccgaccaggagccacacctttaaaaaaaacccccaaacccctaactcttccactcctagcaacagtcaaatgtctgttgcccctcagttaggggtgggaggcgtatgagcccctcccctcggggctggcttgacgctgtgaagatctggggcaggaccttgtcctggggttctcaggtggctcacaagatcctcacctcaaaacccctcacttcttgtaacgtcctgttcctaacaaggcctcagttctgggttctaggatgtgaattcttagaggcctatctgccagtcctggtgcccgagtctccctccagtaaggctctgctcccaactctctcacggtacgggctgccctttgaggtcccactccacgctccccggcggggacattttccctgctgtctcccaggaggatagacatgatctgcacactcccacaagaagatgccttgctgtctggggatgggcatctggggtcccgccccaggcagagagtggatggagtgacatctcaggcttggtgagctttagctatgggctatgaaggatctggccttatggtgagggagggtctctaaactcaggtctccaagggacctgtgaacaatgaatatgtgtcaaggtgccatggggacggaagcacagtggtcaatgtatggtttgtccggaggctgtgatgtttgggctagcaaccggtggccaggcacaaatgttttcccaggcttgctgtctctttttctggagagattgttaaacacgagccaggcaaagcgacacaagcctgtaatcccagtgccctggataaaagcttcgaggatcttcagaagttcaaggccagcctggcttacctagagtccctgtttcaacaaaaccccaatacaataaagagatgccatttttcacagaaacagcccttaatcctgacacaaatgtgtgcatgctttctttaagccgagactgcacagcaaagcgctgcttcccaccaggttttttttttttaatatttttattttttttaagatttatttatttattatatgtaagtacactgtagctgtcttcagacactccagaagagggtgtcagatctctttacggatggttgtgagccaccatgtggttgctgggatttgaactccggaccttcggaagagcagttgggtgctcttacccactgagccatctcaccagcccttcccaccaggtttgagtgactttttggtacaagagtgctccccttcctggggacgcttccccttgaccttcccactgctgttactgagcctatcccgtgcagcagaggctctgagcaggtgccgagggccctccttccttcggccaggtaaccagcccctggaccaggtgtccaccaggaaatagagctgaggccccgggccagccatgttctcagagagccgctgagtctgaggaaatcacaacgggaggacgtgttccctccctggggaccgctgagacttactgactcatgtgtgtggggtgggaatcttccaggaagcctccagccagctcagcctcttgggagcctggggtggggacagcctgtccctctgatctgcaggctgacaggacagggagaacgtctcagggttcaaatacctcgggcaggtatttggaaccttcttttggtcctcctgtctgggaggcgaccagtacctgcgcagataggttgggtgtgatgaggttgagctctagacccctaaagtaaggtgaggcaggcgcgcaggaaataggagctttttaaaatgttttaaaaccccaagaaaatcacagcatcgctggacgggaggaaaatgaaagactttggaagtggccaggaatttgactctgcgagttggtttccaagagcctagttaagcatctccaagtggatattaaaagggaacagccagactccagcggcgggggctggagggggcggggagaggaggcagtgccggaagctgcacgctggacgctggacggctggggccacggcactgtgggccaagcaggcagctggtcccgcgctcagggagaggacccagggacgccccgggattccatcgaggctcccccttctatttttttttttttaatttatctccttgcgctccccattccccctctgtgtggcagagacaatgctacttcagttcggagcagagacatatgaccaacacatggaaatgtggtaatttggatctgttcgtgattgcaacagattgaagaaattagaccagacaaagagtgtttttagaggaagaggaggaggaggaggcagagagagagggagagaaggagggcgacggggtgagaaaggggaggaggacccctctgcgcaggggacacccggcatcccagctgcctgctgtaaatacatccgtaggaatggagagagatcgcatcacaggtaggccacagccctccacgtcccgggtaccccatccctgaccaggaccccagtccaaatggtgtggccatactgcggctttgggaagtgagcacccaaggtcacgtttaacaacttttacagaaatctttctttctttctttctttctttctttctttctttctttctttctttcctttctttctttctttctttctttctttctttctttctttctttctttctttctttctttctttctttctttctttcttttcctgctgactattccacattggtgagctggaatgtggcttccccactcgaagcccagccgggtctggcttttatttaaactgggccccttctgccgagctgtttctctttcattttccggtgtgccacttttctgtctgtgatcgctgtgaattcagagacgctggaagggtggatagtggggatggactctgcacagggccaaagcaagcttgtttatctatcatctggccttggtctcctcctgaaatagccttgctgggcctcccgggctgctgattatagaggtggtgtctcccagtgcttggaggaggtgtatgcacacgtgtgcaccctcgtgtgtgtgtgtgtgtgtgtgtgttcttgggccagagtgcagtgtgcatgagtgcacatgcaaccacgtactcctgcagcccccttagacccaatatagacccagcaggggtgtgaacagttcagggaaaggcatctcctttccttagccaccctggtcaagttgttcccaggttaaatttcccagttcctgctgggaccatcaatgtctgaggtcattactgccccttctgccttgagtgtcatctgagtcaggggctgcaggagagtatgggggcggattttagagatgtaactcgtactccggatttgtgttgtcctgtgctcatgatgagactgaaccccaccccaaagtgtcattggcaccggggtattggttacctctgagtgcatgcacagagaggtccctgagaagccaaagggaaggaagaagacacatctcaggtcccatctgagggatgacctgtcaccaccaaccctgggattactgcaattctgatgctggccaggccttcactgagaggtggccacctggtgtcttgctgacagcagtgtgtcctgtgatcctgtcgggcacagcacgaaacccgggagggaaacctgcttgtgatcagcatgattagtagataggcgaggttttctgcccagtttgtagaggcaacatggcaggggacactagcagctgcttccgaggcctgcacaggtggtgatgtatcctcaccccacccccaggaagcctggccctgccacctcctcgtgaccagctgtaaaatgacagttgtgttagcggctggctgacaggggcctgcacttgtctgtgcggctgtactgggttttgggttcagggcctcctcaaccactaagccacacatgtgtccagcccagccttcattctgtgcatgacagggcccagcccaggtaggtgacagcagggtatttgagaggctcgcatgagggagaggtggttcccttgagactcaagggtggaagcttggagattcacaggctgaccagagaacaaagcagcctttgagagccctggatcctggccttcaccacccgaccctcactggtgcccttagccaaggacagcgcagcaccggaccagagcgagaccttctccttttgtttgttttgaggcaggttacctggccccaatttcactgtgtagtcctggatggtattgaactcccaatcctgctgcctctatggtcaggttgctgggattacaaacctgccgcaggtttatgtgatgctgggaatggaccagggtactgtgccagggccatacactctaccagtgagctacatcctcacgtggtgccttctcttaggatgggtcacggccaaagaccagtcctcccctccccctctttttttttgggggggctgtgaatggaatccagggcctcagttgtgcctggaggtgctgtacagttgcagttctccccgacatttacattttctttttttcattttgaggtgtcgtcttgctatgtgtccctggttgatctcaaactcaggattaccctacttcagcctcctgagtaactggatctgggcacaggccaccatgctaggcatgactgtcgctctaggaacccttcatttggatgtatttttacaaaagttttcttaaccaaaactcagccgtaaatggccagactaggacagaagaggaaaacccccacccctcctccagcctggtcttcacccagttgattaattagggtcagttggagccctaatcctaaccccagtccccggggaagtcaggctcttgccctgtccctgcagggtggccttgagcagattactttgtggcttgccctcagtttccttatctgtagagtgagactgagtccctccccttggtgggcttctgaggttttggtgtgcacttggctggctccccgtttccagctggctgtgctgtatcctgccattctgtctcagtgtcagatgctatgaaagctgcctccttccatccctgcttccacgctgggaggctgtgggccagggcactccagtggatggagacctggctggctggatgccccaaggactggtggctgaagccggtccagccctgctgcccaggaggtgtggtcaagggtgtggtcttgccctggttggggccatgggaccttctagccgcagggaagaggttcagggcttgagtgggcatccttagctctgccctgtcctttcttttcctttccgctccccctcccaccttgtggggctggcccggggtcctctcagagatttccccaggcaaatgcttcaggctcctcagcagggctggcatgagtcactgagcagagacaggccccagaggcacgggatgctgcgttctcagccaagggtcggcgtggtttctcttttcagtcttctggattggctttgtggctcttagaaattaagcagttttatcttgttccaagcgcttgtgtttcagcacggggtggggagaaagagagagagagagagagagagagagagaggctgactctctaaaagggagctttctactcagccaggggacaaggagaggacagggagggtgagaaaggctaggccaatggggcagtcacagacagggatcatgggagacactgcccagtaaggaatccacacatggctctctgcaagggtccaactgccctggcattggatgtatgctcctggctggggtctggtttgtgtagtgagacaccagggtcccaggtcttctctgccacggggcaggcagacaaccggggctctctggaggctcactgccccattcagtcctctcatctcccacctctgggctggccgcagagcctctggcgggctccagctgtgactgatggattgctgtgactttgcttagctctgcaggtcagaaatcagaagcagaacgagctgggcagggctagctccttctgaagctccaagcagctcttggcccaatgctttcccagctcctggtggctccagcagcgtcggctttcttggcttctgcctctgctgtctcgtgaccggcttctctcagatctccctctgcctttctaaaaatgaggatatttaaggcctctgggcagctgggatgatcacaacttaagccaccacattctatccacaaaaagcctttccttttttttttttcctttcaagaaaaaaaaaaaaaagagtctatctgtgtttgtgtacatttgccctgacacgtgtggaggtcagaggacaacttgaagaaatctgttctctgtttccatcatttgggtgcagaaacagaattcacgtcatcaggcttagtgacaagcacctttaccagttgagccatatagcttgcccaagagccttttctcccagacactgctctctgtgttggggggggatagacgtatggggtggtaggggtatggggatatggggtgtgagagtaccagagtaagagtctggggtggtaggcgtttgtgggggacaccattctccctgtgtagctggtgttgggctggttataagactagtaatagttgaggtggccttgaacccctgatggtcctgcctccgcctatcaagtgctgggattacaggtgtgtgccttcacaccaggctctgcccatttttgagtcaagttgctttgttattgagttgagggagctctttatatatgctggttattagatccttatttgatctatcctgtcggtactttctcctgctccgtggacagttgttaccctcacagcacccgcctgggtttgaagcttacaatgaagagtggagaatagcacaccacctggccacttgattccttcagcattgcctgtcacatgggtttgagcaggagatgtggtgtctgtatgtgtgtgtgtgcgcacatgtagaagccagtggacagccttggctattgttcttcaggcaccacccaccacatgttttgagacagagtcgcttaacagcctggagcttgttgtgtaggccaggtggccatcgagctctgaggacccacctgggctgaaactgcacacgtcaccataccaggctctttaccagggttctgagattttgaactcgggtcatcctgtttgcaagacattgctgaccgagctccccaggctgcggtggtgtgtgtttatggggagttattagaagctcctacaactgaggggtggactgacttgggggcttgaacagccagagaaaaccaacagttcaaaagccatgggcagagaggacctcaaaaacaaaggctctgacgttagagccaaggagggtgtgagtggagaggggtgctgtggaaatgggtgggaaagaaatggcctctgactctgttctgtttgccccatgctcatcctgggaagccctcagtctggacttggataaggccagccggtgtcctaggcgacggtctctccagttcagggctcccagccacgtgtgtgttgacatgtgtggtgtatgtcacaggacatagctatcaataatgaagagagtactccaggacctgagagatggctcagcagttaaggctcttgcaggggacccagttttcatccccagcacccacatggcagctcacaaccatctgtaactctaatgattcctcctggcttctgagggtaccagacagacacacaccatgcacagacattcatgcaaacaaaaagaagaagaagaagaagaagaagaagaagaagaagaagaagaagaagaagaagaagaagaagaagaagaagaagaagaaggtataccttacagattcagggttctgcctggtgtcccagcccaaggtggcgagaaagggttggggattggtgtcctgcctggagagggtagccttggtctgcgtttgtgacctgtgttggtgggcaaggaccatcctcaaggacctggatagtcactgtggacgtggtgggtgtgttctatagacaggcaaagcctattgatcaacactgtctatttgcagggtgttggtggcccagcaagggctaactctctacttgcaggaaatagagaggcagctgcagggatctttttgtccagcagggggcggtgcaagctcttaaaagcccatgtacttgggtattgctttccttggctctgcagaagggctgcatgctgctgcagagctgccagtacaacttgattaggctgaaggggagggaagcggcaagaggagaccctcaggaaataataagaaggagccactgaattccaatcccagcctatggcacccgggggaggaggctggtgccccctgactctttctgtactgtattttcctaggttttgtttgaagtgtttcaatctctcaagtttttccagcccacttgtgtgtgtgtgtgtgtgtgtgtgtgtgtgtgtgtgtgtgtgtgtggtcagtgagcgggcgtggaggtcaacgttgtcttccggtattgtttattaccttggttttcaaaaatgacttgtgtgtgtgagtgtgtgtgtgtgtgtgtgtgtgtgtgtgtgtgtggctgtatacacatgcatgttcagccatacctagcttttacatggcactgggattgaacccaggtgcccattcagtaggcaatagaacttctttactagctcaggccccaattttctaactttctgaaaacatttcaaacaagaagacagacggtgaaaccctgcccacacacccacctgctggaccctaccgtgagtgttccttgttaggtgtgcatctgtccaccagcaatcaggctctcctcagacatatttggttgactaattaatttgtctttgagacggagtctcatgtagcccaggcaaccctcaatctcctgtagctaaagttggccttgaacttctaatccttctacctccatctcccaaagggtgatgtcaaagacaagtgccaccatgccgggtgactgaggcagttttaataagttgcaggtaccagtactcatgacctctcctccctctgctcatggatcgttagccactgtggttctctctccacatttctgtgtctcctggatgctgtgcatgccatcctgtgattttttacaggtaaatgcaccgtgtgttccaactgcagccacaacatggaacactgacatcacctggacagtcccctgtcccttcctatacagctgctgcctttgtatcctccagggaacttcccaccctgggttcctttatccagttcgaatgttggcagagtcgctcagtactgtgggtccccatggcgtgttccatgctgggtcctactctccgcccgacccttctgtggctttgacattttcctgtttcctctggttgggcctccgtgatgaacatcttatcctggtctttcatgagagctgcttcatctgtctcatgggagcacctagacccttggtgtctatttagttccgggagaaacttctacatcttcacccacagcagccatccggcttcagtcccagcggcagtgtgcagtggtgtgcgttcacactggcatctgctgctgtcagtcttaaatgttagtcattctggcggtgggggtgtgggtgctatttcactctggctttaattttgcatctgtctgatgactaatgtggcccagcacattttcatgaccttcccagctattcatgtatttttcctttgtaaaatatctttctcaaatctgttgctcattttcaaattggacggctcaactcttcctcattacttctggatattggtcttttgtcagatgtatgctttgcaaggagtttatttcagtctgtggcttggccattccttttgttaatcatgtttttttttcttttctttctttcttttttcttttttttttaaataagcataagtgtgtccccatcgcttttggtgaagtctcattttgcaatttctttctcttttttcctctgtggttttcactttctgtgttttataagaattgtctcttgccaagttgcaaaggtactgccagttttcttctagtatgttgatagtttctgtttttatgcttcagctaagagtctggggtaaggcagggtcaaggttcatgctgcccactgctgcctgctgccgctgctgctccgtctttgcagtcgctcagctttggctgctgacatctccttccttgttgtgtggtttggaaacttctcttgaaaatcatttgaggaccggggccgtaggagtcagcaccacagaaaccgtgcgtggctgtggacaacacctgtcaccccagcactcacagggtaggggcaagagaactgctcaaggtcatcaacaaacagtgagcttgcgggcagcctcgggcacacaggatgctgacttgaataataaggaagagggctggagaggtggctcagtggttaaagaacactggctgctctggcagaggaactgggttcagttcccagctcccacaagaaggctcacagctgcccagaactcctagaagttctaggagatccgcctcccactcctggcctctccagcgttgtaagcggtgctcacacaaacaggcaggcacacgtgcacacacatgcaagttctgcacacatgccaatttgattgtatagccctgtgatcctagtacttggaagcaagagatacgcagatagatctcttagagttctaggccagccagggctacagaatgagtgagaccttggctccaaaaaaaagttgtctttttttttaagcagggaagggagagagttttggggcaggatggctcagagggtaaaactgcctgccaccaaactgatggcctgagtcagctatccaggccccacccaacagaaggagggacctgactcccggcatggtcctctgacttccacaccctccagacacacacaaaataagtctgaaaatgcaaaagtcccccatccctctgctcgtctctccacagaatccgctgcctctgcgtctcactgagtgtttcttgcaagtgttgtcagatctcttcctgaggactgtaggttttggcactactgtggcttggagggctgtatatatacattgcaggacaaatagactgtttctcttgggaccctgtcataacacaggggtgctcctaacacaagtgtggggaacatggcttcgcccagcaccaagcaaccccctcattctagaggactccgctgtcctgttactcgggccagctcggatgtctccaggcaatgtagttcccaagggttggcctccgttccttaagactgcccttccttgggtaccactcagcaagtctggtcttctggaaattctgactcatgagctgtgaactggggagactttttagggtttggtctttactggagcagctcatacaaagcagggggctttccgatgtgcctgtcagtgtatcagggggactggctaggtttattcttatgtgtttgtgtctatgtgtgtctgtgcatatctgtgtatgtgtctgtgtgtacctgtgtctatgtatgtctgtgtgtgtatatgtgtgtctctgtgtgtgaacgcgtgtgtctgtgtctatttgctagtgtgtgtgtctgtgtgcttatgtgtctgtgtgtgactgtgtatctgtatgtgtctgtgtgtgttgtctatgtgtgtctgtgtgtatatatatgtgtttgtgagtgtgtgtgaacatgtatatctgtttgtgtgtgtctgtgtgtctgtttgctagtgtatgtctgtgtgcttgtatgtgtgtatgtgttcttctgtgtgtgaaggtaagtctctgtgtgtttttgtgtgtgtctgtgtctgctagtgtgtgtgtctgtgtgcttatgtgtgtgactgtgtgtttgtatgtgtctgtgtgtctgcttgtctgtgtctgtgggtgggactgcaggtgctcagaggatagagtctcttggggctagaattttatataggtggttgtgagctgccagccaaacccagttttgcaggagttgtccagactgagccatttttccagcccctcagcaaggcttctttgaacactagaaatgaactggacacaggggaagtttgaaaggcaccggagcatgggacctgaggcgagccgaactctctgagcacggatgaatcaagtcctcttcctgtgttccccttcctgtgtgcccttgtgctgtgtcatggagaccaccatgtgtgacagtgacagctttagtcatcctccgggatcaataaaccctgtcggtgtttagtaacacttgctgatcggtgagaattttcacaacagttgtggtagctcacacttatgaccccagcactcaggagtctgaggcataaagattaacaagagtttgagaccagtgtaggatacacaggaagttcaaggtcttcctgggcttcatagaagaccatgtctcgggctggagagatggctcagtggtcaagtgcactggtttcccttgaaggtgacctgggctcagttcctagcacacatgtggtgactcacaattattggtaaatccagttccaggagatccgatgcccacttctgacctcacaggcactgagtatgcacgtacatgctgtatagatattaatggaggcaaagtgctcatgtgtgaaacaaaaatgaataaatataaaaaatttaggtctcaaaaataaaacaaatgggcaacacgcacacacacacacacaccacggcctttatataagttgcagttaagatcgctgatatcatatctgtttcctggccaggccctgactaagccaccaagtcagtaggaggaaggaagtaatgatgataaaggcagaaatcaaggaaatggaaaaagagaaaaaataaggtcattctttgtttctctaagacgatatggagcgacaattctcaactagattgccgagctggaggaggaaagtccaaacaggggtggtcagggtcggcggtgaggcggtaccctgcgaagtgccgtaggtagaactgagcctgctggtagacacctttactcccagcactcagaagcagagacaggtggatctgagttctgagccagcctgggctacttttcaagataaaatttatcgagccaggtgtatggaatccctctcgggaactgaggtaggaagattgagagtttgaagctagcctgtctcaagggggaaaaaaaaggataaccaaagacaacattaaagaaggttaagaagaagccagaatagcattctgtctatgatatttaactgtgccgggcgatgacgcctcacacctttaatcccagcaatcaagaggcagaggcgggtggatctctgagttcgaggccagcctggtgtacatagtgggttctggaacagccagagaagccctgtgtggtggtttgaataggtgtggcccccacagacgcatgtatttgtacacttagcccatggagactgacacagttaagggatgtggccttgttagagtaggtgtggccttgatgaaagaagtgtgtcactgtgggggtgggctttaagatctcttaggattaagctctgctcagtgtggagcgcagcttctccttgctgcctgctcaactctctgctcctccagcgccatgtcggcctgcacattgtcatgcttcccgccatgatgataatggactaaacctctgaaactgtaaaccagccccgatgaaatgttttcttttgtaagagtggccttgttcatggtgtctcttcacagcaatgaaaccctaagacaccctgtcttgaaaaccttaattcattaatttacagccagatgaggtggcccagactttaatctcttagctgaggagtcagaggcagggccagaggcaggaggattcccttggctttctgaccagtctcatcaagtgaactccagactcagtggagagccactgaggaggacacctgatatcttccacacacaaaaggggcagataaaatggctcaacaggtgccgggcgtgatggtgaacacctttaatcccagcactcgggaggcagaggcaggcggatttccgagttcgaggccagcctggtctacaaagtgagttccaggacagccaggactatacagagaaaccctgtctcgaagaaccaaaaaaaaaaaaaaaaaaaaaaaaaaaagatggctcagcaggtaaaggtgcttgctgctaggcaagggtgacagacttataacaccatgacaccatgttttacctgggttctaaggatcaaactctatacaaatacatattcctactttaaactttatttactttatttatataaatacactgtagctatcttcagacacaccagaagagggcatcagatcctgttacagatacttgtgagccaccatgtgtttgctgggaattgaactcaggacctctggaaaagcagtcagtgctcttacctgctgagccatctctccagccctcctacttgcttaagtacacctcttgatgttgttacttagtggctgtttaatgggttctaatagggattcagtataaaggtaagcctttacccagcctgcttagaattagccatgcatgtgtgtttgtagatgtgggtacaggagtgtgcacacatgtgtgtttgtaggtgtgggtgcgggagtaaatgcatacacacacacatgtggaggcctgatgttgatgttatcttctctcgactgcactgagacagtgtctggggctgaacacagagctcactgttggtgctgggattccttgtctctgcctcctgcatggttggattacaggtgggactaccacatggcaccactgggtgtactgggtctcatgcttgcttggcaagcactttgcctgctgagccatctccagtctttctctgtaattattattatttgaattttaatcactacctatgctcaaaccacacaattctgtatatgcatgcctatataaagaatagctataaagggttaaagaagcccagtccaaagaggcagggagctgttaaagatgcaaacagacactgcaggtggtgagaggcaactgtgaagatcccactgtgagaaccactggaggtgtcggagcccagccccagggttacagcatcctcaaaggaaggcactggaccttagaggagaggtgcctcgcccacgcccagcctgctcatggagaggccctttgggttcccacctgcttgaggccaccctgtctctctttggctactggacctggccagatgctgccaggtccagatctgcccttggctggacttgtccaggagctggcccttccagtggaggcaatgctctgctcctgcttgggtcacagcgacctcctccctgctgtgagctggtaggcagctcataggctcaacctgcctcatcaatccacaacagtttagttcctcttctgagtggccctggtgtcatagtcattggctggaccaggagaggcgacttgccgtgccagcagccgcagatttggggcttagccttcagacctggggtgttgtgtagctgctgcgtggtgtggcccaacctcccttctctcaacaggtctggagtggcaccttctttagggcaggtttcagccgcccaggactggcccagagcattgctgctcttccctgtgtgcccagggtcctgggatctgctcccagacctggagggagggggatcccaaaggcactggcccttctgtctcacttacttttctgttgctgttaagagacaccctgaccaaggcaacttatagtttattgtttattggggccttgcttacaatttcagagggtgggaccatggccatcatgcagggaccacgtgttggagccgtatctgagatcttacaccttacccactaagcaggaggcagagaggaagccaacctcataacccacctgcagcgacacacctcttccaacaaggccacactcctaatcctttgcagttcaccatgggggactgaacattcaaatgtgtaccatttggggccattctgttcaaatcaccacagaggggatcctaaaggcactgacctagccttctccatcatcttgtacttctcagacacaagcagggaggctcaggctgggggctttctgacagagaacaaacatgtgctggactcttctgcagtggacccagcctgtgtgtgtcacctctggtactgacccaacacctccagcccctgcacttactggtgcgccaggtccggaaagaggcctgcctcttctttcccctggtgtgcttctgtgtgtgcacatgcgtgcatacatgcctttgacagaggaaatgattcactcccgagttcaaaggttggggtcagagcagccagcgtgggtgaaggcaactaaggaggggaagcagggtgggatgaggtggggaccggaggctgggtgtgtcctgcagagccagctcccacacttggaagctctgatgggaattaccggattcccgggagccactggaatccagtctcccaagggtagagactgtttcaccatgacgataagatgcacacagtgaagaaaatgtcagggatatatgtgcgtgcatgtgtgtgtgcacatgtacatgtgtgagtgtacgtacgtgtatgtatgtgtgtatgcatgtgtgtgtgtgtgtctgtgtgtgttgaatgtggaggtgggcacagctatggggatgtatgtgtatatatctctcattgtaagttctgtatctccttgactgtgtgacagaatcttcacctgcctctctccacccttccaagctgcatacagaagggcaggaatgccggagtattcatggtgcgcatgcgtaaacctgcacacaccagctaagggtcagcggcccatggtcagtacctaggcctggcaggaaaccggctctgggaagctgtacgcccgccccacctttggcatgaaaccatgttttgttgctgttcgttcacagcaacagagaatgggggtggggcagcttcagtgtgaggagccgttgtgtgggacagcagtctagggtcttgtcatgatctcctgagggcttgggggatatacctatatcctcaggggtcttacaaaacctagagtcaccacagtgaatgccagtgtgccttcttctacgtgagctttgggcagggagaaggctgacctcagagatggccttcagccctgcccctggagtctcagccaagaccagagcctagaaagttccacatcaggaagggttggtctgctgcaggatagccgccctcccagctgaccaggaaccttagggaacctattagctgaagcacaacttctgagctaagcatattgtaaccccagcctaggaagctgaggcaggaggattgctgactgtagacgagatgttgtctcagataataacagaactgaaaacaaaagcccatagattctcactgaccctggctccccaagatgctatgaggttcagggaaaggagctgaacggcccagtggatctggggtggtcatgtggggccccacatgtgccagtggccagctgctctagttgtgacgtgggaaagatccactaatttttcctgaccagtgctggggtggacagcatgtgactttaaccgtgagataaaactgggaaggcagggtttgtgtggggactgccagatagtgggatacggagcagctgattaagacatcaggatcatcctgtgaacgttctgaggacagagcctgaaaggaaggtgtaggcagagctggctgctctgggaggacctgagggatgcaccttggggtagtggccaggaattcttggcatttcttgactgtggctgtattactcctgtttctgttctgtttcatctggctttctccatctgtctgtctgtctgtctgtctgtctgtctgtctgtctctgtctctttctctctctgtgtctatgtggagcatatatgtatctgtatgtggccaagtatgtttgtgtgtctgtgtctaagttaccctctgccttctctggttgttgggtcaggccctcccagtctagcacaccctcattttaactccatgctagccacagatatcctacttccaaatgagctcacagccacaggtaccaggggctcaaacctgaacttgtggtacggggtcacagtctgaccttttatagaggctcagtcctaagagaggatgtgttgggttgattggggcccaggaaggacccactgtggccacagagcttgggagagtgtctgtcagggtcatgggatgctgaaggaaatgaagcgttatagtcactatagccacaggcttggaggactgtcaggtagagggtgagcctttgagctcccccaaataccaaagcaaccctagaaacttggaatgttctggaaagtgtgaaaaccgtgatttttctctccattttcacttaccatcaatgactagcatgtctcatgaagtagtgagttgctggtgtcttggagttgcaaggaagggcgatgtggctgctgtggatggctgagaagatgggaccttagagcagctgctgatacaatgagcctcctagcttagaagagtttgaattaccaagtgtccgtgaactgaaggctccatatgcagtggggctcactgccaggcccctcacgggtcatcaggtcctagtgttgagtcacctagtgcccctgtattgggaggtctgcatgcagtgagtgctccctgccaggtcctgaatcaggctctgtcctgttatctatcgctcctgccttttcctttcaactgcatgggtgacaggaagtgtgctgtcctggtttccatggagacagaacctcagctccattcagtctgaggccagctttggaaattaaatacctgacagtttctgggaaagtgtgagcagatggtttaatgtgcgtaagagcacagatatgcgtgtgacttaggcgtgcacatacgcacgtgcacgcagtcatgagcctggagacggagctgttcaggctgaggtctcccgagccctgggccgatactgttctcagtgcttaacagatattaacagagcttcctttcataatgaacctttgaaggagatagtgtccatctgattttatagaagagaaaacaaaggccccctaaggggccaaaggacttgtcttaaggcctgccagtcatttttttctctcatggcacagttgctatcttctgtctggtgtgaagctgaggcatcaaagaaggttctagtaacctcagccctttgttttgggctcagcatctaaaaagttagcttctccgaagcttctgctgggctcgcggcccctttccagctgaatgatcccgtatgtggaggttgggttcacgcccagcctctccagcctggctgctgtcacaccatgctgttcatggcctatgcgctagcttgggaggtgcacctctctgtagctgtcagggaaggaagtgacccttgtgcaggccgtttctcctccctggatgtcttaggaagagcaggcgaagggcttactggctctggctgccttttctatgcccctcaccacgggtggacaaaccattgatgatgggtcacgtctgctgcagcaaagggccagtgtctgcttgttacacagtcatcagggacgttgatcctgaccctttgtgccaccgaccttctcaaccccgactgtgcccttccagtggcatctcactgaacgtgggcactgggctaaagggaggtggtgtttgaagatctggaaccacgtgctggctgcacaagctaacagtgaccacggttccctccctgatctgacctccaaacactgggttcttaccgtgatacaaggacaggacgggatcaagatggtgttttgtggcttaacttaatgtaattaaaattgtcttgagacaaggtttctgtaagtacaggctggactagaagtcttgacagctctcctgcccttgcacgccgggattacagagataaggcaccgtgctcgtcttaagaccaaccaactttatctgcttatctacctcccttcctcgctcttttcctttcctccgctctccccacccccttcgccctctcttagtctcacataggccaggatggccttgacctcccatgtagctaaggatgacactaaacttctgatcctcctgcctcctcccgggtgctggggttagaggtatgcgccgtcatatccagtttatgcaattctgagggttgagcccagagttccatgtatgttaggcaagccctctaccaactgagttgcatccccaggcctcaaggtggtttccgagttagtaatctgcataactggtcatgctttgccctttgtagttgctcagtaaaacaccgagtgactgactctgggcttccccaagaatccaaagagctgaaggctttggccaatctgcctgactataccctatggtccagtgtgtccagtgtgcccctttgggtgtctgaccatgaggacaggagtcctctgtccctccctggacactgactccatgtggcatcaggaacagctggagatgaccagcatcctctgccgtcaggctgggcgccaaattccctggcatgctgtgtcggtgattgtcagccacatgtgtggagcgccatgtgcagagggtccggacacttatccctcccccgtgggcggtcctggggtcttccttcagcacactggccaacacttgctggtcctgactgctgcagtgttcatctgtgccgcacagctgtatacaaagacctcaagaagggatccgaatctgtgtgtcccgtggggagacccttgaccccaccccacacagaaaggactttgtgtgtaaaatactggggtcaggctaagcaggcctgggagggcagaaaagtatcctttcctctgtccctgtggctcagccctgagtttccatcctctgaggaagaccaacacaggagatatttagtatccaaagcaagcaagcaagcaagcaagcaagcaagcaagcaagcaagcaagcaaacaagataccggagcactataaggctgcagatgcgaaccccttggtagagctctgtagggctgaggatgctgacgccatgatagagctctgtcttgccttcaccagtttccctaaaacaggacatccaggccacctcactgtgtgtcttgttctgccgacacctctgaggcccagcagaggtggacatgggagctgggcgtgcggttctaggcccagcattgagtcacactgttgggagcttgggtgccctctgcccattctccactctgaggaaggggaccacggggcagctgccttaaagcaatgttacagagtttccctagaaccagataacagacagagtccctggagggccagtaagctcatgggaggcacagtaggccctcagaagggggtgggaggcacagtaggccctcagaaaggggctgtcttgccctctcgttcatgttttatcccatttccactccttactccttcctcctccagacattccttcctcccccttgccccccagatgcccttcctaccatcctggccccctgctggttctctaagtatggcttggccaggatggctccccgccttgtgtttcctggaggtggccttcagtcaggccagtcagatatccaggaagttagctgggtacttgggtgggctgagcatccttctctgggatgtcaaggaaggagttaatgttctctgacatgtttgcatgctaggccctgagcacaaggcaggacagtgagctggctcccacttcctggagagtcatctgggtcaggctggaggagctgagctcaggatgaggaagccaaggtctctctcacagtaggtgctcttggaatcctgggaagaaagatgaggcacccctgtggctctcctgtggctcccctgtggctggactgtccttctgacacttctgacacatgtctgctcaatccttgtgtccagccttgctccacaactacagcggcgccctgttcactttccctgccctgccctgcgctgtgactaaacacacggccaagctgaaatcgctgtaactccatcacttactgttaaccctagactgccttcatttgctccatgaacctctctgtcctttgtccacggtggagctgttctttggtttgtttattttaaagatttatttatttattttatgtatatgagtacactatagctgtacagatggttgtgagccatcatatggttgctgggagttgaactcgggacctctgcttgctccagctcaaagatttatttattgctatatgtaagtaaactgtagctgtcttcagacacaccagaagagggtgtcagatctcattacggatggttgtgagccaccatgtggtagctgggatttgaactcaggacctttggaagagcagttagtgctcttagctgctgagccatttcaccagccccggatctattctttttaaagtcagactgtattagtttttttttccaggataaaatattctggaaaaagcaacttaagggagaaaggatttcttttagtctatggtcccagatggacacagtccatccttgctgggaagccattggtgaccgagcttaagtcacattgtaccaacaggaaacagagagagaataggaagttgggccaagctaccaacttcaaggcctgcccccagtgacatatttcctctagcaaggctacatccacagaggtttcccaaacaatactgggaccaactgtttgaatgtgtgaatttgtggagggcatttcacatcggaagcatatcatggagtctcgccgtgcagcccaggctcactaagaagcctcagactggcaccactcctccagcctcagcctcctgagggctgccatgacagatgtgcaccatcctacacccgggactaacttggagtcattcttgatcatttcccgagtccctgccaaattctcgagtctcgttttcaagatttcctactgctgcccgctccatatgcccacccagggtaacgtccgcacagccagagtgtgcgggagggtgttaggacccagttccaatcctggctctgtcatttatccatccctacccctgcaccgcctgcctcccatcccccgctgtccttggcagagcttcttacctgactcaggacgaaggggtgggggggggggtagaggggtggggggtgtctcttgcatgttaaacgaggggtcaaccacctgcttcagatccagaacggaccacttactgagcttctctttggggccagaggttttaacatgttattgtggagtccttcaaacagggtgtctttgcctcagtgctaggctgtcaggaggaagtaaggaaggacccagggccctggtgggtggagtctgatgccaagttcagacctcagtacctgcctcatgctggggcacatgaagcgcctggctccctcctgccaagctcatcgaccttacctgtctctcatgatctgcacaccccctgctgcttctgggcacacccgtgtttgtcacccatccccgctttcaggttagctggttttctgtgaggataagactcccaagttatgccttggatgcgcgtggctattctttttgatgtttcccatgccaacccggctagttgctcaggacccccaccccaccttacccttgaggagttccccgcctggttgggtttccattgggggattctctgactgtcataataataatgacaatagtaataacaagctaaaaagacttgagctagacacggtgcttctctcctcgcgtcctagtccaggtcggagcctctggtggcccagagcatccaggacccagtttgtttctttgctgtatcttcgcagcatgcagcacctcccttgtgagaaaagcatggctgcatccaggcagggagaaagaaagacagggcaggggctggggctggatggtgcttttaattttaggagagtggcttgaaaattcagtgctttaatgtttcttgtccccctccaccagcagtgacctagctgcacggccatcccaagcagtcggggcagctgagaaatgtctcgtttagatggccagccatataaacagtgaatgcttctgtagctatagaaaaaagaggtcaaacaagggtgagcaagagcctggcgtatgcaccaaggctcctttcataggtgcggagtggcggcagtcacgcggcaggggtccctcttacgctgaactagaggctcgcagtgggcagggagccaggccacctgtggaagggctgtggcagctgcctgtgctcttcagtggctgcagctcagctggtgggtgggatgaggagtgggcgtcatggaagtgacctggttctgcagaagggtgacacaggctctgagattctacatttcagtgtgacagcgttgggtttttcctagatgaatattctaggttattcacaagaccggtcagacttctgcttccgtgagccttgcatagcccagggactcggaagatccctctgtccctcatgggtttcaatgtctctctcttcctctatcggggggtgctcacctggtggctccctgggctggagcacccaatttgatttcttgggaaatgacacctcacgtgcccaaggttccacttgggtctgtgtgtggccctgagttccaacccttgaggggcctttgctgagccttgctgatttcctgttcttgagctatgccaccctgcccagctgtgcactcatggggctgagacagcagcctggggccaggccgagccactgggactcaggttctctggtccctacatccaacgtagacatggccctgtctgggaatgtccccgccctgctcctgaaggtcaggaatgtctgcctggtgtaagcagctgtacacagaggtggcccatctggttggcagtaccttccaaagtcaaggctaatttcactcctggcttcttgcctcctctggccagaccctccctgagggggtcttctgcagtaggagacactaagtgtgatgggtaattttaattgttaactcgacatgatctagaatcacctgggaagggcagcttcagtgagggactgtctagattaggccagcctgagtgtgtgtatgtgtgtgtgtgtgtgtgtgtgtgtgtgtgtgtgtgtgtgtgttgggggaggggttactcacatggtggtttccaggctgaagcacctgttttgacctcttgggacacggtgcctcaagttcccaaggttccacttgggtccatgtacagccctgagttctgagttcccaaggtcaaggggcctttataaagctaggcatgactgagttttaggaaggcccttccactgtcagcacggaggcctggagcattggtagggaagaggaaagacctgggggtgagaggtttgggagaatagagatggtgatagagctgtttgtttgttttgagacagggtttctctggggaacagccctgactatcctggaactcactttgcagaccattctagcctcaaactcacagagattcccctgcctcagccttctaagtcctgggattaaaggtgtgaggtatcaccacctggcttattttattttaaagatttattcgtgtgtgtctgtgtgtctgtgtgtcatgtatgtatgggtggtcacagaagacagaagaaggtgtcagccccctgaagctgggatcacagtgggttgtaacccactcaatgccctgatagtacttagtattaattaacaaaaccccgaagcctggctgacttggtttcatcctatgatgggacagtggtaattgacccccagaggccatggctggcttggcccctcctggtctattgccatgtgaggtcattctttcagctctccactgtacacatctccagtaagactgtctgtcccctgcttagttctcaggagccaggggctgcctagaggaacatccctcaaatatggaggggcctcaggtgtggagcagcagcagtgttgtgggtcccaggccatggcttatttgtcatttgtgctgacttctctctgctcagaccgcttggcagagctggcaagcccctggcaagggccctccgtttgcagtcatccgactgtgactcacgctggggaacagggacagagtgggagctgggtgtgttaacagcaaactcattagtccccgaggtcgcttcacatcagggacaaatagctcatttagcctgcctggggcttccagccacactcagggcaaggaaggcacagccaaccaaagtacgcaggcccagattatcctcagggccccgcccgctcccctgcccactccctgccctcccatcctgtttcccagacaagtcctgaacctggactgaggctgcctgtcagagggaggctggcctaggctggctgctgctgtctcccacagaatctctgtgagtctggggtgtgattcgtagcaggaaactaccagattttggaggacagggaacatggaaaactccagccagttgacgcatctcctccaacagccctttgatgtttgttgagtgaggggtcagagctaagcagcccctgaacccttggtcctggctctgcactctgggtaaagccctggaatatccaggtccctgggctcactggccgcagagttactttccggtagccatgacaaaacagatggcaaagccactcaagggagaaagtgtttgctttgggtcccagtggaaggggacagcccaccatggtggggaagctcgaggcatctggtcacagggtgtcaaagtcaagcagaaaacattggatgctcagctcacttttctctcttttttttttttttccttttaaaaatagtcagctacttgatttagtgcgtggagggtttgtccgtgccatctcacacacgtggaggtcagggacagcttgcagaatcacttctctccctcagcacatgggtcccagggactgcactcagagtgttggccttggaggcaagcacctttacccaccaagccacctcagcagcccacttcgtccttctcatacagtctgggaccccatcctagggaatgatgctgcctacagtgggcaagtcttcccaactcaactgtcttagttagggtctctatttctgtgaaaagacgccatcactgtgacggaggcaactcttaaaggcaactctttaattggggttggcttacagtttcagaggttcagtccattgtcatcatggtgggaaagcatggcagtgtgcaggcagacatagtactagaggagttctaaatcttgatccgaaggcagccaggaggggactggatcttatactgggaggagcttgagcatagaagacctcaaagccctcccatacagtgatgcacttcctgcaacaaaaccacacctacttcaacaaggccacacctcctcatagtagtccctctcctcatgggccaagcattcaaacacatgagtctatggggccataattattcaaaccaccactttaatgaagacaatctgagaggccttcctggaggctcttctcccagattattctaggctcatcaagttgactattgagattaaccatcacactggccaaggtagaaaatccaggtgtttttgagagagtcaccatctccaccccctggtcttaggaggcttttgaggctgtgtgtgcagactccatggccgaggcctagtggatgagattccagttccttggcagctaagaccttttcattttggctttttaggttgacatggcaccttttgtcaggcaaaggatgaggaggggggagatgtctaagttcctctaggccagtccccactgaagacattgatgtcttatctactcctgattggggggctgttgctccctaacacaggagcccagggtgagcttccagtgataagaagtcctaggtcctccctacttgctcttctgcaaagctgatgtctagttccttgattgacagtgtgagtcagcctgaaaactctctctctctctctctgcctcccatctcacttcctcttcctcctgctcatctctctcatctctgtttctccctgaaggggaccctgcaggtggtcatagcaggcaggtcacagaggtgagatgacactcaggctgtgttcccaaccttcctgcaccctctcttcctcttctttccttttccttctccctccctccttctctcctccctcctcccttcctccctccctttctttcaacatgatcccatgtagcccaaattactacttagcagaggatgaccttgaacgcttggtagtcctgcctccaccacccaagtgctgggattatagggttctaccacttggttgtggaatgctggagtttgagcccagggtggcatgcatgccaggcgagtgctgtaccagctgagctccacacccagctggatggggacattcatttgctgtgctggggatggagcctagagtctcaaacctgctcagtaaataccatggctttctctctccctctctttctctctctcttctcatctcatctcatagcccaggctagccttaagctcactgtatataactggccttgactcttgctctgtaactctcttgcccccttgctcctcctctccctccattcccttctcccttctctccatgtggccatggctagcctctccttctctctgcctttctctgcctctactgccctcttaactcccctccccatgctctgaataaactctattccacagttaaaaaaaattggccttggctttatcttcctgcctgcctgattcctgaatgccagaatgtaggcctgtgctactgtgcccagcttttgtatctttcaaaaggccaaaagtggccgaaggcagatggagcagcattgctaggtactaagatcccatctctgggagtgttccagagtggaatgggtgggcgtcttaattagggtttcgttgctgttgaagagacaccgtgaccacagcaactcttgtgaaggacagcatttaacgtttaaactaacaacatttattaaggaccagccccgtacagatgaggctggcttacaggttcagaggttcagtccattatcatcatggtgggaagcatggaatcgtggcaggcatggtgcaggaggagctgagaattccacctcttgttcagaaggcagctaggagaagagggactcttccacactgggcagagcttccaagcaacttcctccaacaaggccacacctcctaacagtaccactccctgtgggccacccatactcaaaccaccagaatgggcattctgggacagatgtggaagtgggttacagtagagctgcaaggggcagataagccttgcagaccctctgtggggtacaggaaaatgtctgtccttctgcccttcccagcttggtacctgttcccagttgagtcatttctctgtctgccctcgggggtcccaccttggggctggtaggggcattgttagggtcccaccatggtcataggcggggatgggaggtgctttctggggatgtatcactgggataactgtggtgactttaaaaataaatgctttcttcttactctgagccacgctgacgtggaagtagggcaggctggtgactcagccctggtccctacactgcagccgtggcaagctgcctccagcctcagaccccatagagcaagggtgctcgctttagagagggtgatggggaggccagaatactgcaggcctctgggaacagcctgtccttctctgatggagatggggcccagccaagagtcccggcagtgcagggtgaggcgccttcagctggcacagcctgaggggcaagcttaattgcttactgtcctgagactaagggccagtctagacacacttaagggccggtctagacacccttgctaggtcccttatgtaccttatggatcccattccttggtccccctcctctgtctctgcatctccagcttcgggtggggagccagatgctggggatattagtccattccaaagctgatgtaggaagaatatgcggtagttgggctgaagagagaaagaagatacccagggggggtgcatgagccagggaaagaagggcgttgtgtctctctgccatgtggggtacaactcacatgaattcaccatcgatactcactgggcaagctatcagacaagcccatgctcagagcctaggtaccagggctcggccagtgaggggagccatgtgaatgtcctttctactcttgctccctgggttctctagatttcatgtctttttaacctagagcttttccagctaagttaggcgtggtagcacaggtttgcaatcccagtataatcccagtgcaaggaagagtaagcaagaagatcaagatttcaaggctagcctgggctactctgtctcagaaacaaaactccctcagatttgcaagggaaactggaaataagcaggccaggctgtgttgacgtgtttggtcctagggacggggatgtggggttctgtaagctgtgggctgcagtggtgatggtggctctgccctcggggacacggggtgcgggtgcctttggagcccagagcggagcatttgctgggctctgaggccgggagcccctgggatgactcaggagctcgcgtttagaagacttacacgaggaatgaggagtttgcttaaaacgccctggctgcctgtgtgctgtggtcaggctttgttgtaaacgtttagcatgaagcaggcccagctggggactgggaattaagaaagattagtcatgtggctctgtgaagggaagcctatgtcttggatgggtgctggcatggcctttgtggtctgttcacatttgtcagctgtgcccaccagaaggctgccccggggaaagtttcagagtggctggcctgcaggagtcttggtcatccaagcttggagacagccctgacagaaaggccctggagtggcccatctgggagcaggactctgcctgtgtttctgcattattattttatttttattttattattattattatttgggtttttcgagacaggatttctctgtgtagccttggctgtcctggaactcactttgtagaccaggctggcctcgaactcagaaatccacctgccccccgccccccgagtgctgggattaaaggcgtgcaccaccacacctggcttctgcattatttttaaactggggtgtctcagtgtgatgggagagcttccgctcccttcaagcctgtttggaccagttcctctatcaggagtccacagatactgccatccagcaaaaggaattgtgtcccatcattcagtgggctggactcgagctggggcatcccaatagcatgtctagaggtgaggtagcaactctacctgagggttttttttgggggggggaggtgtggatggtcattctgttgtcagagactgaaattacaaactccacagggaagagattcggggatgtcctggtggaggagatagctggtacaaacgtcctggggcaggaggcatcatgaggaacagagaagaggccggtgaacttagtgcatggctgaggcccgagcatctggaggaggcagtgaggggtttgttcagtgtgagtgaggcccagggggcatctgacctaagcctggaagcctggggtgtctggaggaggaaagtgggtggtcagtcaggagcctgggagagggaggagccaacacagtaagaggatgggggctggtgagaaatctggagaagctactgttaaattctatatagacaatgtaacattagctacttctgtaggaactagaggaactggttaaattaggaataaactacaggagctggaatggtggctcagtgtttaagaatgattacagctcttgtagaagacctgggttttctcaccaccatccatgactccagttccaggggatctaatgccttctcctgacctccgtgggctcctgcatgctcgccatgcacagacagacgtacatgccggccgacactccgatacataaaacaagtttgagaggaatgaagtatatgagttattgtttaaaatgatgctatatggcattatcacatgacctcaccgtcatactgcagagtcgacccccggaagaaccaagggcagcagtgcaaacacgtgtttgtctccacccgtattcatgctgtgcacatgtgtgtgtgctcacacacacaattcataaatataatttaaaataaatgagttacttaaagtaatataagcaagactccttaaaaaataactcatttagtttgatgtgcattggtgtgagagagccggagtcacaggcagccgtgagctacactctaggtgctgcggattgaacccaggtcctctggaaagcagccagtgaactcaaccactgtcttgtaggcaaaagggtcagggcctaaatgctattttaacccttagattgccgctgttaaatagcatccagctagatactagagaaaggtgcctagtctggtccccagttagtttggggttcactggccagctgctttgatgttgaggatgaagggaagggatgcaggaggattagcagacacttggcttgagcatctagggagcccacagtagctccattttgccaggatggtgacttctacagcttaggggctagggaggattctacagttcaattgcactgtaccttgtatacagtgtatatgtagtgtatattcagtgtatggaatgtatatacaatatatacagtatatatacagtatacatatagtgcatacacacatatatggcatatacactatatagtacataggtttatatactgtatatatgacatatataacatatatggtatatacattatatatgtagtagtgcacacagcacatatagtatgtatggaattcatatacaatgtgtacagtatgtgtgtagtatatatatatatgtgtgtgtgtgtgtgtgtatggtatatgcacaatatatagcatataggtgtatatatagtatatagcataaatatagtatatatggcatatacaatgtatatatcgtgcatacaggcccacagagttgagccgttgggttctacccttgactatattatgagggggctggtcttgtcactcactgactggagcatcctgttcaaagtgctgggcagggagccacagcctccctgaggaggccacccccactgctgagtcgcttcctgctgaggctgtacctgggctcaggggtcagggatcctgatgtgcaagccaagcggctgtttccgcaagtccttcctgcaccctctttcccaggctttttatgctccattccccagggctgaacctacgggcttcctcttctagcccatttcttccaatgttcaaaagaaaaaaaaaaaaggaaaaaaaaaaagaaaaaagaaaagtctgactgtatttctggctctgcaagtcggctagactcaggtccttagcccctcccccaagacagtgagctgccggaccagtccagttcaccagggtcaccaggtcaccaggtggcttcatagacagctttatcctaagactctttgacttgatgggtcaggcgtgagcttaggtctggctgaactaactgccatacattggctggcttcacagcacaatagaggtgttctctgccacacatgttacagggtctgcagggatgtgtgccatatggttccagagaggagagcctgcccctgaggctctaggttgaattttggcctctggctgctgcgcttcggtggcggcttctgacatcagagggcgcttgtctctgacttcttctctatctgttatctggcctttgagtccaggacacatgctgatcccagggaacctcatctgcccacctgtagcacagacccttaggctacgtctggcctccttgtgagcatccagtaatcatgttatctctttggggtggacgggagccgtggcacacccacaagcaggcaggccttctggagagtttcgcttggagcacagcatcctctccttgaagcatggattacagacctctgagccctacagttctttcttcagctaaactcaaggccagagcccaagactatagagagggagttgggtgaccacctaacctaatgaaagtcccagaatgccacagccaccacatgtgatccgagacagctgggatgatgagaggggctgagggggctgggggtgggtgggactggttcaaagccaagtggcagttgggttatcctggagtttgcagaaggtaattatggtgagaagggaggtaccctgctgtttcccattgtcctcatgggaccgaaagaaaagagacacaagggtgaatttcctattgggaggatggccaaacctgccttggctttgctgatggaggagcctgggcatttagcaggttcccaggctggtacttcgggcggcggagtggttacagtgtggaagggaagcagagggctgggttggttgcttgagtaatggacaagggtgttctggctgtggaagtcagcacccacttctattgtcccatggagtccccgggggcggggagaactccttgaagcctgcaccctggctctccattggaacactgtggtgtgcttggctcctctgcctggatacaggctgagcaacaatgcgctgtgtctctgctaatctgcacttgccctggggagaacaatcgctcgggtgtgtctctgtgtaccaggtgctttttataagaaacaccaatgaacaacgcccactcaggttggacgctgtcccagggacccggcatcttcccagggctttgtggtaagggcctcagcttcttagattggatcctgaaatcccccaaatgtgggataggcaggtgacctggtgatggtcagactgccaggcaggctgagaccctgacagaagccatcaggggtgcccactgctcctgaagtaaggcttccagaaggatgggggtgcgggtgcatctaaaatggccgtggttttgcactttccatgtccaaaagctcacttggttgaaaatagtttttaaaccatctgaggcatgagggagggagggaggggcacattttctgaaataggaaggactctattccagcagcttaaaaaaaaaagtctcaccaaacctagcccaggcttctcctctcctctgcagcctcaccagcctctgcaggtctcagcactgttcttccctcactgagaatggtggaatagggagaaagcagacccagacccaggacagctcagggactcacactgaggaccaggggatgagtcactcgcccactctgcagggacttgtccccagctatgaatccatgcagccctgattgagcagagaggtcccaggtctaaggttgtgcccagcgggcaggagacttggctcatccaggaagtggtgaacaccgcctccccccacccccccaatccctggggacccttcctggtaactagtgtttgttttttctgtatagccccgtggttttctctgcttgcccggtggatgtctgaagtgtgaaggctacttggacagagaaagtctaggctgtgggtacccactgatgtggaaggagcccaggagcagccttcttccttccttctgatgttaggaactatggtttctctcttctggagggaaggtcgtggtccactctctgtactcaggaagcccatacagtggaaggggggaggggcgttgcaacgattcttcagaagggccgcctctccctgccctatcccttccgtagcacttacccaaaggatgcagcagcgacccccgggggtgcaagggggtagcagtcctcgacgtgtggatgctgagaactcccgggaccctcatctctgtagtgaaccgtctagggtcctgcagacccacactagcctagcgctacagcttaacccttgcaggccccgtgcttatatgcgaaggaggcactcaggaactttggctgcgtaaataaaacctcgggcagcaagagcactgcgcccagggaaggggaggaatcttgtccccctcggcgcccgcccgctgctgtggcccggcctccacatcctctacatccgcccacatctggccgcggaggggcgtgagggggaggggccgaggccgtgtctgtcgcggtcccctgggcacccgccaggaagggagaagggggggcagcccaggtcgtgtgcctgggactctgcagtccctgtagaagcagctctggttccatcccctccaggcccagttttgacaggcgggcgcaacagccagtgccgagtcgcggaggccggctggggtacgggaacctgatccagccgggaggcgggggcggggcgggggcccgggtgcttggggaggggccggcgcccgccttcctcccccattcattcagccgaccgtgggggccgaggggctccggcggccagctctgcaccgggagcgggagcgcgcagggcccggtctccgcgggactccctgcgcaccagccaccatgtccgaccccgcggtcaacgcacagctggacgggatcatttcagactttgaaggtgggtgcccgacccagcggttgcttggcgagctgggcaggaacctccaggcgggcctgagacgggacgggatgagcacgggagaggcaagaccccggtttgctcaccctggggctctgcgccccagaccccgcattgccgagttggagagccccattaagggggcctgtagatgatagaccctatagttgggggccacgcgccccctggggatcccaggttcatgctgcctctggggtgttcgtctttttattgttgtttgtttttgctctgggactgtcgtctcctcgagggcgggcttgacttcttgggaacaaccccaggagcgcaattccaccctggaaaccagtgggttttcttcttttggtgctcgccctcagctctcaccagcatgggagttagttcccctcctcggatccagtgggaggccgaatcctcagggtggacctcctcccctcccccacgccagctccggggttggggctgagcccagtcccggggctggcaagggctgccaaattgatcggcccgcaggccccatgcacccgaggggatcccggcccggcgagtctcagggtccagggtgggatgtccaatacccccgatccaggcctgggacacctttatccatcagagagagaagagccttttgggagagagggggcctgtgcgctcacacaaggacagcactttcgcctcttgtcctgagtttacaaagtgcaaagatacttgggggccgtttcctccaagggtgggccttccatctccgccctgggcttgcatgcgcgggctttccagaggcctcgtgactgccactgccggtgccgtggcccctcgtcctgcgtccccctccggagtaaataaagccagtggaaagggaggcttacacaatggtgtcccgcgcgcgtctggggctgggtttccgaggggcgggcctgactctgccgggcccggagcccccgcccctctgaggggctctcaggcagccttaggcagagccctctggtgggctgtgagcgagggaggaagggcttcacatagttaaagacggccaggtttcaggctcttcaagtgaccagttgggggtgctccaggccccatgactggaaccagggggtttgtcctgagcccacctgaggtcagccttatctctgagttaggtgattagctatgtgtcaggaagtgggtggggggcggggggcggggggcgggtggttgctgatgagttgtgtattggcaggtacaggctttaggagcctggaatatcatacccacttggtcacctcagtggtgggagcaagtatctgtgctgaatcaaggcatagtcgctgcttaggagatcttgtgcccccaaccacctggacctcttggagtccatgtctatactaaggtctccccagacctgttccgtgctgttgtgccttctgcatgtcctagggactgtcctagctccttgggttgcccctctgtgcacctctcctttgccctggagcctttcattctcctggaagtgtatctgaaagtcagccagtcagttcccttctctgcaaggtctgagcgggaagggggatgaggagggggtggaggacctggtgggggggggcactaccttttccgggttctggtctctgtgtttgctctctgctcggacccagggggcattcaggtgtctgctttcatcccccaaggagttggggacagggtttctgcagaatgttgcagaagttttgttggggaggagaagtttgggggttgtaaggtctcagaagctggctctctttgcattgtggaggccagctgcccctgcctctttggtttctctgtgtaactccttactcgctgagtggtgccctcactgggctgcctcccaagccagcttcttgaccctcaaatttagttcaagacaatggccacattgagagcatcctggtatagaggttggcagtcttgaggaagccgggcctgctgagcatgctgccctcctgcatgccagtcttcctactgtgaactccgaaaagctcagatggggaatgggttcagggctttgagtccccagagattactagcccgggctatcactagtgaaagtgcgtgtgtgagtgtgtgtcgcacgtgtacacttatgcaagagaagctttgtgctttgtataaacgacccgaaaagtgacctcctaagtaagtgtcctaggaatacagagttgagttgatgtgcagaaagggagtggggggttgggcagctaggcagataaagggatgtggagagagtatgactcagcctagcatgggtgagagaagctggcagtctgaatccaggcaggaaaagtagtaagagactcgcagggagaagttgggaatggggagacaagaccttgaggcaaaggagagctgtgattgtgacagggaaagaagagggccttctgtccagagcaaggagctgagatttcaggatgagactgctaggaagttgggccatgtagggaccagtttacagtgaatgttcagagggggtccagccacagagggtcaggtgttccctgatgctagcttggccaggctcagttggaggagcccctagtttttgctcaggcttcctgcggggtgtatgtggctctgccagatagttggaggagggagaaaagagccaagttggctacagccactggggcccatagtccctttgtgaggctggacagatgggctcatgagatggagcacaaaggacctaggtgctccccccagggagctccggctggcacatggctggctagttctgagccatgtgtatctctgttttgtttttttctttgtttgttttgtttgtttgtttgttttaatatagcagagagcctgcttgcctgcccccaaggaggtttggcgttagcagctgtaccaggcaggaacagcctgccctacagggcagagggaagtgattcatgacgggttaggattcccaggtcagtgctgtgtgcctgtggggctagtggatccagcctgtagctgtgtgtgctggagtaggtgtgccaactgggctcgggtctcagtcttggtcgcaactgtcttggacactcatttcgcctctcattttccgtctgttttattccagctgtccccatatatcccccaccctgtcccctccccccaccccacctcccaccccacccccatctgaagcacgggccacacttgtgatcataactggaggtcttggtgggattcagacttggtttttccatccctggggactgagaggtggcaggacccttgaaagacatgaacatcttgtgtcccagtatctatctttggtttcctttcaaggaacacccccccccccaatcccattccctagggatgccaaaggtcttttactatttcctactttcccacttcccaacatcaagggttttgagtcatcggtactacccacccctcccccacgaggtgactctgagacccatcactgtctgtgactgggtagctggaggagtcacccctttctctctccttttccggtcagcagaagcgtggggcaactggatggtatgttcttcctgaatggaggccagatctgttatcgcaaacacagttacaagctgggtccttgtgtaacaaaagcctcttcaagtgccagccgctggcctgttcttctcaccagcatctgctgtaatcagttttacacccccagaacaatcctgagagtccttgatgtttgttgaaacagatctggcccagaagcccagactctccaatctgagtggcaagacttttctccgctgtcccagggaggctcttctgcactgggccctggacagcctgtggtccctttccccctcgatagagaggtgaccaagaaatcaggggtcatgtagacacctctgggacaaggtggtggtgatagctggacccaggtgccactttgttccctagaggaaaggcctgttgcttgcaggtagctgtagatctgacctcttaattaatgcccttgggccttctgtgtgatgaattctgagatttccagacactcccggctcctgggaatcattgcctcactgctgagggggattcaaggactctagggcttcctgcagtgaagagtagctggcctcacacttttaatcctagcacgtgggaggcagaggcaggtggatttctgagtttgaggccagcctggtctacagagtgagttccaggacagtcagggctacacagtgaaaccctgtctccaaaacacaaaacaaacaaaaaaatcgggagctggcctcttttataatcccaaagtttttggtaaccccagtttggtatactaggtgcgcccatcagttgtacccatgtgagcaagttcactagacattagatggggacagtaggtgtgtaagcaccccactgaggattacctggaccacatatctaccaagaagtggggcacatcccctttgggggggcatcagtcgtgaatccttcctgggtcatgtgacattccaggaagggttcgaaggatgcactggtggaggggcagtgtgggagtggggtagaaggtggcagggggcagggtttgtatagagagaggtcttacagggagtgatgggtatcaccctgggcacctagtaggtggggtgacctcactctactgtctgtgcggctcacagtgagctgagagactcacccctcgcatccagcgctcggtggggttgtgaatgacaccgtgccggttccggacggcactctatgagttataggtagtagctagcaccgggcatagaactggctgtgtgaggtttggaggttgctgttagaactgagtgatgtttgcacaagacatacagatcctcagtgctagaaggtcacacagacaagaacccatctgaccccactgtggggacgagactggataacagggttgccattgataatggcaagtcccagggacttggtacccacagaatcctcctgggaatctctcaggccttaacagatactcagatgaaacagggtcggggaggtccctcctcctctctggctgatattccccatagagctcggggtgacatggggttcagggtccttctaactgggaggttgtcccagtatctcacaccagaatgtcacaggtgagggacacggcatgtccatctgcaggaccaagtgctgacagccacagggtacgcaccccgtgcctggagtgtgaagcgggcctggagacctgagaagtgggaggccaggtgagaagaggttcgtagtggcctcagccttcttgtccaggtggcatggtgcagactcagttctgagctgtgactgtcccatccatagggaccagaagggccaagaagcccaagttccatgttatcagcttgctaggtcccgttacctatcagctatgcacctccacccatatccttaaggtccaggggactctgggcctggagtgaggactgtgggggacttggtacctggacaaagaggacacttgtcttgttctggctgtgctttagagtcccctgcttctgaactcaaagcacctcccaccagccaggagggacattcccaagggaagcacaaacgtgtgcacccttggtgtagaagccagggagtttcccacctggtgacttgtggcctctgctttcccctccagagggacagggcctgacatcctggtaccgagaggacagagctggggtctccttttctctctctaccttccatttcagaagtggccatgccagagccttgactgttgttcctgtgaccacccacttttgtctctcagggaggctaacctgccactcagagggtctatgtcgacacctaaacccaggacagaggtgtacctctctgccagactggcctaggtgctctcttctgggctcaggcccccatgacagtgttgcttgtggtctgtcccttgtgctgtgagcagtggctggaggaaggacactgggcagcctggacttggtgggtgctgatctagagctggaaactttaggcaagttcatcttttttaaaggggtatagcatggttgagatgagttctctccctgtatggctcagcctcgctgcagtcctcctgcctcggcctcttgagtgctggggtcacagacagaaaattcactccctaaaatgaattgagaattcatgcagtttctcttgaccaagcccgggaaagttggcggaatggtggctctctttccaaagccctctttggttttgttttcccaaatttggagactcatggaattctctgcagtcacagtcttagatgctgaaggatttgtcatcttgttggccctggacaccccagacacccagagggcatttctgggccttggctgtttaatttggtctggacagaacccggaggctccattcagtcgggaaccaacagatattctagaaacttcaagtttgttgtcatgttttaagagtaccactaattctcaagaatttcaggagacagaacgaccttgtttctgctagaaaatataaacatgtagttccgcctgcgccctggctctctggggaacatggggggggcacaaaagtaggtaaggtgttctttctccccccgcccccttcttcataaaagggagagcgacaggaagggaggggaaaacttaaagatttatttttattttgtgtgtatgggtgtttgcctgcctgtttatgtgcactatgtgcatgcctgatgcttgaggaggtcagaagtggacattaaatctcccagtactggaattacagacagttgggaagctgctgcatatgtgctgggaaccaaacccgaaccctctgcaagagcagccagtgctctaaccactgagccatctctccagcaccacttgctcttttctctgtcgatggtcctggaattaactcagtctccctcctcagacttccctggcttctttggcctacaatccaggaactacagggctgtggtcctaagtgttcagccttattcctgtgcccctatagcattcagcttctcgtgtctccaagactgagtcttgaggtttcagtgagaccttgaactctgaccatctgctcctttgactgcaagtgggggcgggggcgggggtggggatggggatgggggaatcactgccccacatctgctcctgatcacaggtctcttggaggctgagtctgaactcacataaggggaggattgggaatagctgtcctttgcagcctgggtgggacccggctttcttcctgtcccttttcacaaaagtctcacctctacaaccaaatatcagacttttaaacaagttcctggtgggataggaagagctcacaggtgtttgcagataggccaggacaaggcgtggtcttctccttatgggaaactgcagctgagggagtcagtgcaggtcatcgctggtggtttccgtttcacctctttttggtggcgagtgatcagttgtcagtcctaccttatgcaagttcagcctgagcccccagagacctgcagtcaggggcaactgtgggcaatggcctctccccccatttgcagtagccccagactgtagcagccagcatcctggtggattccacactcaggacagggtctcaccccactaggttcaggaagcagtctctatgggggacgctgccccaccttccatgtgggtgggcagcttctctgagaagggaaggccaggctcctgccctctgtcccctagagacagatagcatcggcagtataaacggacaagtttccctggctcccctgtcccctgtccactgtcccctatcatgggtcaagtgctggacttctctgaaaattaattgggttatggggtttttcctttattgcaaagtgaaactcccaagttctctgcggctcctgcagacttgtgtatgcagaggtgcagaggtgcccgggacctccaccaacacgggggggggggggacggacggacggacggacggacgctttgcttgcttgtgagatctaggctctgtgcccttcctcctaaccaggaggctcacagagctgaggtgagggaggggccccttgtgtggagtcccagccatagtgcaagcagctgaatgtgtgcagtggtgaatttcaagtcctgccctccctatgaaatcccaggaaaagccaccagcttgcttccttctttcctccctccctccctccctccctccctccctccctccctttcttccttccgtctctcccttcttccctctctcccttcctccttccttccctccctcctcctctctctcctttcctccccctctctcttttcttcttttctttcttcccttctttcttaactacaaaaaaacccctagccaccaggtgaatgcagactggctctttcattttcacacatcaggcctggtacagcagagggtggagcttgaaggccaggtctggtcagagaaattgggctttgggacaggataggaacccttctctaacctgaggaacacgtccttggacatcaggtcaggctggggcatgcagctctcttacttacctctctgctggtatttaaatgagagaggcaagctcctgcaaacagctgtgctggagccagctgtcaggagtggggctggctgggagggggtgcacgcgtgcatgtgggtgtgtctgtctgtctgtctgtcccacttgtgtgttctttgtctctgacccacgtcccagcccttgccagctgtctcctgtagctcacaggccctacctcccatccagcttggctttctgtctggggtggtcaggtgaaccctgctgttgagctgcgggcaggggcaggtgctacctggcagacccaggttgtcgaagctaagtccctgctaggcaccactgccatggtgtctggtttgcctttctcgtctgcctggttcttgagtgtgatggcaatctcagtcagtttggcagtagggagtaggggtacctggggtcccaagcctagggtctacagtgacagcctctgtctgcttcagtccagagttccatctgtgaaataggagctctggtctcccatcaagctgtgtagcaggggggtttggagcctttttacagaagcctcagtggtcatgaggacagagcccactccacagtcctggacaagacatcctcctttctgtgactcagtttcccatccgctgtgaaagtagacatattttcctggctctactttaggcctaaagggaccacattgtcccctatctggtgttctttattacaagacagaaaaatgaagatctggaaacgaaaaggggggcatgtcttttgttttgtttctttttcaaaaagtatttcaagtttctcttattacttctatgaacttatcacctgtgtgacacacacacacacacacacacacacacacatgcatgaatctgaggattaagagtgtgtgggaagtacccagccaatgctgacttgagagatttggggatactgggccggcagcagtacagagaggacaatgggttagccaggctcttgctccctggatggtgactgtcagccggaggaagctggcagtggcttggaggatgggcgtgtgtgctgcgctgtgaggagtttcctgcagtagggacatgaagccaatttctttttccctattcaggctctggctgtgagccttgggcagttttggagaccttgtgactcatatgcaccctttgtccctggcagccccgtaggtagcttagtcctgcgtgtccttcagtctgtggttgcctggggagttagctgttgggagcagtggcagctgaagctggacattgtccttgggtgactgctgggaagcctgggatagggtgggctgctgggctggcagctctggggtactttcagggagggctgtttccagaatagtgtggcccacatggtttacatcttataggattacaggaggtaggtgaggaagctgaggcttgtgaacccacagaaggggggtccccaaatgctgcccctcagaaagaccctggagtgtccaggtcctcccttctctgactggggctgatggtctacgctttatgttttgggggctgttctgatgaatggttggagcagccaaatgcccatctagaatcagaagattagaacttagagaattcaagaaaaaggactcaggaatgtgggcagtcttggtcaccctgctacctggagaagcagaaggcagtgccactgttggagtgagatctgttatgcatgctgtcacagcagcatggaaggatgtttgtcaagattctgacagaagttatctgtcttgtgggattatatttctttctttctttttttttcacattttctgcctcgtgcttagatggtgttaatagtcaggaaaaaggccgtaactgttatttttaaagttaattttcaaaaggaaaagtagctttactcaaacttctctttccatttggagatcgagggctcagaggtctgagaagggagtccagtcccaagtagcgaagccagggtgccagagacgggcctgaccgtgccaggcccgaccctgccaggtctgatcctgccaggtgagggttaagtgcagcacggtgtgcttcacctttgtccagcagtgagggctgctgggagtcacctctgcaggcatagtttgcaccacaaggaatgtggtcagagttaacgtcttccattttggactgagagagtgtgcagggctgaccctccctttccatccctgctgagcctgtgttgaactccacagttgctggaccaggttagttcaggagcaagaagccgcctgagctggttgtagatatttgtgttctgctaggaaatggaagggcctttcctttgcaggaactaggccagaggggccacgtgcctggaccagggtggaatgtagatggttttggtcatttcttgatcatatctttattacacacacacacacacacaccacagaccacacattcacaacacaccaaacatataccataaacacagagagacacagacagatagacacagacatagatacacacacaccacatacacagagaaacaagaacatgccacttgtatgtcacacacacatacacataccatacagagacacacagacagacagacacaggtaccacacacacacacacaccacatacacagagagacagaacataccacatgtatgtcacacacacaccacacacacagacagacacacaccacacacacatacagagacacacagatagacacaaatatcacacagacagacacacatatcacatacaacacacacatacagatacagcacacacatgcacacacacacacacacaccacacaaacagagagacagacacaaacacacacacgtaccacacagacagacacacatcatacgcatagacacacaaacacacaccacaccacacacacacacacacacacacacaccagctctgggcagttcacagatggcagagggagaatgaggctgaaacttcaggtttttagctgagaaaagaatgggccagcaggcctgggaccacaaggaactccacaaacagtacacccatcctccagtcttccttcctgtctccacacctccccaacacccccttgggggtgggggtggggggcttcaggctggtgggcctggtccctgctgaggcagagactccaaggcaggaggcttcttgatgtctcacatccccaggtccccagctgctcggtgcctgacaggtcagaggtcaggggctaaactgctgggctctgggctgtggactggaggtcctggctcagccagatgcctctctggcacctaaggttagtatttactgtaaacagctcttcagtgtttctgttattagtgtaaacagctcaaggggccctctgtgctgtgcttgaggcctgggtgaggtgcaacagggagaggtgggtcaggtgctgaggtgctttgctgcctgcacagaagaggggagactctgctagggagccagggataatgagtccctctcccgcccacactaggggcatagtgcccgcctgtgaggagaggagaggtcttgtctcaacagagggacattctcctgaaaccttcggtgtgtcggatgacggaatacagttgggagcctcggagcggagctgggactgattgagtgttgaggctgagcagacggatagaacaaatgcgtgagacacaggccaggccagattggtcccgggaggcctaggaaaaggtcagcagcagggattgcaggcgcttgggtctgccgggccggaaacagcactggaagccacaagtgcagcttcagggctctgtggggcagggtcctcaccactcagaggggaagcctgtcacagaaatctgtcctcttccagtcatggtggccctgatggccttgctgtataggcgtgtcctctgcctttgcttcagtctccacctccttcctccagccctctctcccttggttcctttcctgtatgtacttgcatgtgtgtgcatgtacatgcctctgccgtgtcagaggaaagcctgtgatagctggttctctctaccatgcaggacctgggaatcaaactcaggtcctcaggcttagcagcaagcccctttacccatggagccctctcagcagcccttattcttcttttctgtcctcctgctctaaacccaggatgatattatcttgagatccctaaaggctcttgcaaaggcctccctgggtacctaagattctgatctctgcgggatgtattgagccatagccgactgtggtggtggtgccggtggtggtagtggcatcaagaaactggatgtccctggttgtatgtcttgagtgactgcttgcttccatgtctgtttgataagcatggcacagttcctgtttcttggctgtttgatgggctgcactttgggagaagcaataggtccaaggctctgtcccctatacccctgcttcctgtatcactggctctgatgtggtccaagtcttgaagtgggcgaacaaggtagtggatcagttgtggtggacctgagagctggacatttggtgagagactttagccgcctcctgcgcctgtcatgtggaaagatgctctccaggtgaacccaccttctctcttccttccctttgtcccctctcccagagctgcttcccttgtaggcccctttgtcccctctcccagagctgcttccctgtaggcccctctggtcccagctcctcttctctttcctgagtcccagccccacccaggagctggtaagtgtggagaacctagactatggccaactcgaacaaggttccgagatgcttaggttcaagggtgcttcgtggagtagcaactgctttgctgacaaaggggaaccccagggagtcacatacaggagagtctccctctccccacagcagcttcttctagaattttctcagcgtctagctatgagaacagtgttccgtgaacctcctttgccaagtctttgaggctaaacagagaataagccaacgccattctcaggctcagtggaacctaagcaaggcggaccaggcacaggcagagcagtgtggtccctgaggctctgtccccacctccaggcagctgggtgaacattgggtctgactgtcaagaactggcctctgacccctctcctggctcctgggtgctgctctgaccggagcctgaactctgccccctggggtcactgtgccctgtaattaggccatagctcatatctgcctgggcctcaggccacagcacagctccatctggcactccaagatggctcgtgtgattaatggagggccccactgggctgagtggcccctggtattaaatgcagcttcttctttatttttttcttcccacttttaaagcgcctttgagatttttcccatggtgtgtggagggagaagggagggtatctactcaggcaggtcaggactggtcactatgcatgtactaatgactgggtttacgatggaggagagaatagttgagacagggacctgtgcctagcagctctgctccgtgctgagaagacactcacccacgtctccctcaggagctctgggtcttcctggtccccaggaaagcacccaggtttaccgtgctgggtggggagggaggacccagacaggtctgtatcctattttcaggctgcctgacaaggtttcatggaggcttcagctggaggatcatgggaaatgggtcccatgggaagctttagaatatgggagagccgtgtttggggaatcggggaccttctgtcgagttagatggtggggagcagataggaggtaaaccaagaaggtcagttgggtgtgctgggtgttggcctcaagttggactcttggctttctgtccaactgggaaaactaggaaactttgcctccttgcctggggcttctgaccttcacagtctgggtgacaagggctgcaggctaagctcttttctttttttttttttctttttcttttttcttcttttctttttctattgaagtcttcagcctcccctctgccttcatcagctgccatttaattgggaacctttgccctaaggggactcaaagttcacatgatcccctcccctccccaaggccaggagcatccagaccctcccccagggacctgtctgagtctgtatccattgcgtatccacgtctggatgtgtgtggtggcacaagcccatattccgatcgcttgggaagtagagtcaggaggtatggattcaaagccagccttagctgcagagtgagtttgagggcagcctggcaatgtaagaccctgtctgataaacaaaacacaaaatcaaaatacttctgggtccatctctgcgcagcgttagggagagaagcctcctcttccctgtggccttcccgccccaaaccaggaagttcttcctcatatctgcccaacgtcttcgcaatttaggccagtttcttcagcagctgatgattccaggtgtgttcaggtcccatggctgtaatttagcaaagaagaaaaggagtcggcctcctgaaatgtttatggctagtgtggaatgaccctggggctccaagcaggagggggccgcggtgggaggttggaggcaggaatctaaaacttacacaaagagggccttcactgggccagcctccttgaggggcagcaggctttggaagaagaaagttggaggcccacagaggtgggtgtaggctcaggtctcccacagaggcgggtggaggctcaggtccccatcaggtctggatagaggcttcttataggcctgtctgatgggtttgtggcatagtgaggcttcctgaccctgtatgaggctacctgaagtcctcttcttgtgtgtgtgtgtgagctggggcttccagactgcacatgaggacggtttaacaaagaggggacctcatctccgcctcactgatgtgcacagtgctggataaggcgaagctgaataggagtgtggtgggctgagagagggaggagcaggaagcccatttgtggcagcgtcccttctccggacttcagagccaggactgagaggtggcttcagagtagacagaaagccatgaagcccaacaggatggcacagcaggcacaagtcccctcctcttcttcctccccctccccctccccctccccctcctcctcttccactctcttgccttttctttccctccccttctctatgttgacagagctcttgctgtgcaggctctcacacaggctccactatggagccttacccaagcctgctgctccaggatcgaaggggaccttggtttctggggctgctatgtcagatttggtggggcttcccacccttacactccaaggattctctcagagctgtgcaggacggcagttccaactcaaggtgtgtgtggcgtaactaccttctccaggccccgagggagggatgatctgtcctgtgcctctcctggctttggtggctgtcggcatcttcggcttgcacacccatcccagacgcgcatctgtgacggccttcacgtgtctgtctgtctgttttatcagttttatctctctccaccttccatgacatttgtcacgagttcgggacccactctaacccagggcaatccttcagagtctcacttcaatcataactggagaaattcttcctaaatagggccacagctctaggttgtgggagccagtgcataaatgtgtcacctgggtagacactgcctctctcactgtgcctggccacccaaagtaggtaggtggatttgggggagccactgtgacagggtctgagtggattccagatgggtgagcctgttgctgtctggacccaggtgccgcttgcttcatctcaaccttggtagattttcccaaggagaaaccaacacagtgaagtcggggacaggttgcctaggaagaagtcagtggtagaggacttgtctagcaggccagtaaaaaccccagttgtctgggaccctgagcacaaggtcttgaccacccgccatccacagctgccctgcccgtgggctgcccatattccatatcctgctttgagggaccaggctctcctaggtttgcttctgggaggagcgggcacttgtattgtgtgctgggctgagattctgtgcccagctcctccgtgctcctccatgcctttgttcttggtttttcttcatcttatcacagagacccagcggcagcagcgaaggggtgtttctgacctccttaacaccatcattgcagagtgtacccagcctgcctttggcatgtgataggggaacttgagggcccagaatgaccttggcagaggaagaagtctctttctaaagtcaccagaaagtaccacacggagccaggctctgtggtacatacactggaggggctgaggcaggaggaccactgagagtttgaggtcagcttggactatatacagtgtgagcctctgtctcagtgaagcaagagagaagaggaagcgaaaagggtggagggggagggggagacagcacagagtgacccctttgctttagcagaatggcctcctttggctttgcccttggaaccccaaatctcctggcagaatcacttcccagggataccggttgtacctctttttagggttgggtgaatagaagcttctagccttctcgtcacccagagatgccagatagttcatgctgggtttccaaaggcaggcagagaggatcatgggacaggactctatgggcagtgacctcggtgtcatgatccccggccaccatctgtgggccacatgtacagctaagcccagggtagctggatcccttagctgccgtgctggagccctgggcagaggtgctttttcttctagggtctgtctgttgggcccagcagggcttggatctgaggaagtgcagcaggggggggggctctctcctgaggtgtcagcccctgctttctcactttccttcctagactcctggtgggcttgaggtgtcccgctgacactgtcctaggaggaagaacttcctgtcttcatttggacttggcctggctttgttgttaaataacctcctggttgttggtcgggatggctgtttacagaagtccggtacaggctccactcactgggactaattttaagttcttcctttgggattgttctgcttcctgaagggacatccctccccatgtcacccatctgtatcctcctcctgtcctaagcctgctccccacccccacctactgccctaccccaccccccagcagtccaggcctccaaaagtagctcctgagacagggacccaaggggagatggtcactagggtccccgtgttgggataggacagaggggacaaggacatgaaaggcaacagagtccagtgtgtcctgaggagccccgaggacggcaaactggtccccagagaagtcctgcctaggaatgctcagagagctgcagtgttgatattccagtttggggagggctaggatgtggcttctttctggtcccaggcagaggcagagccaggctacctaagatgaagtaaagccctgcagggtgcatgagcctccctgggagaggtgggccacctgtggagacactcaacagaaggttgattagacaaccacagtgttggatcccctccactgtcatcacatgtgtggtcgcccccatgccaccacaccaccgtcacacacaatgaggtttggcggtccaggatacagacactcactgtcaccccagcactgtttggtttgcgtctacagctgccaaccttgaatgaggctcacagactggcctcatgccccgaggtcagctagggaaggcctgggacccttgctctacatttccagtctctgcagggtgggagttgctgcctccagtttgggctgagtaggaggcgaaggcctggcagccagacccagctctgccaaggccaaggctttgcccgctgccctgccccactctttcccagagtaaggatctgggcctaaggcccagttctcaaaggagcctgagagcagggcaggacagttgcggtgggggagccctctggttcactgcccaccagctcctctcgatacaggtgcatggttaccgatgggtggagcgctttcctctgtgacaccatctgtcctgtgtgtgccttgagtggtggactctgccttccacgtggctggcgtatgctgcagctcctggggagaagtctgacctgggtaactcagagcctgagttccatgctgttccctcctgtggggctgtgcaccgtgctgtgttggcctcggactttccacttccttgcaggatagtggtctcaggccgggccagggctgtgcagcttttccctggtctcccctcccagagcaggcccagcacaatctgtgcaccaggaagtgttcgatccggtttcaggagccgggagaggttcagaggttcccaaagcctgcagtcagagcaggagtcttaacaatggctccttgtgcttgctacattcctccttaaacaggcccagaccaaggctgctcgggcttgggccccccacgggttctgggggaaggagggtttacagctggaaggaggctgctggcctttttgtgtctagcggctgaggcaaggtgctggagggacaaggagagcatgacttgtgctttggaaaggagtgagctgggaggtgcgtgttctcttgcaaagtcctccgggaaccaccagagcttccctagcaaggcgcggctttgatagcgtcacccacgtgacgtcacacatgggggcctgtgttcctcttaattgtgtcccttatttctcttttgagacaggttctctcactgaacctggagtttgccggttcagctagactggctggccaaaggctccatcctcctgtgtctgcacaccagtactagagttagagatgccggccaccacacctggctttcacacggtttctggggattataacttgagtcctcatgcataccaagcaagagctttcccctgctgggctgggggccggatgggagaactcaccttctcactcgtgctatgcttgaggcaacggctctcactctcatcttctcagtctagggtcctggaagtcttagtgacccacattggtcaccgatgcattaggccgggtcaggaggagttgattgaagagcatccactgccatccatctaaagagtcattcctgagaggcgcaagtgcccgtgtgccagcaaactgtgcttgtgcccatgatgagcagttaggaccctgtgtgtgcggcttgtatcctgctatctttactaaatgttctcagcatttctcatcttccacaatgtgattcctatttatgagactctggcctgtaaatccgaaccgttttcagagtttgccatgttcctgcggatatagatgccctcctacataaatcttctgattatttccttgggatgcaaatcccagaagtgggccaggagcacaagattcctcaagagcctttgtttccagttaggagggtggaggctgaggggctcagagaagtaagtgagacttgagtctggcttgggtaggggtgggtcagtcctccatggcattttggattaaaaaataaaggggggcagagtgatagccccctgctgtaaaggctggtggcactgttttagctcccaggggcgatgtggagacttatatgttcggtatgtaatagaccatggtttggggtgctcactggggacctgtgccaggctgccatgtctacctagccagtcactaggatctgatgtgtagtcgagtcagagtctccgacagatgccctcgattgaacagcagtgtggcacattgtcccatcccattggggtccatagaggatgtgatgacctcacaccactccgagtcctgcatctcctgcatctcctgtatctcctgcctctcctgcatctgtcccaggctgctatattgcagcattggtgacagggtagacacatccattctctctcagttctggagtttaaattctaggtgtcagtaaagctgccctctatccagacaccctaaaggggaggctacttcctgccagccccagctgtggccggagacactcagatggcctctggcttctagctctctggtaatcttacacatttctcattcaaggacactgcttggtgtccgtcccaaatcagaagtattcgtatcttgattatcgtcgtgagactcgtttcccacaagcggggttagcacttatacaggtctttttgtggggggcagttttcagaaccactgcataacccttgaagaaagtggggtgtcttgggctgggtgggattgaaggccatgcctccctgctcctgaagcccatcctctaggctccattcccacagttagaagcccgcagccatgctgttagaagttagtgaggttgtggtggtactgtgagcggccatgtctagttttgaacaccctccctgaagcctgtggcctgtggtgtggcaaagaagcatgtgggtagcgtgggatccaggaaggctggggagagcctggcttgggacccgatacttctcctgaggaggacaggcgcttatccggggatggttctgagccaaggtaggctctcccgctgtgcacgcacactgtatagatagctaaggacctagggcccttgagactgtatgtggctgaggcctgtgggtgcagttggttcagctcattttgctttgtgccagcgttcaaaactagcacagaaatgtggactgttggcagaatgcgcaggcagagaccaaggctccttcgccatcctctgagaatgtgggagggggttggggtgggaccaggtaggggcagggatggtgaggggtgggggtgattgtagtttatgattggctcggggccttgttcccttctttatcccccagaaggaaaggggtccccacaggagtactccagtctggggagccaggcaccagttgcctctcccctccacagctgttgaatcaacacaatgcagtcttgccttgtgttaggagtgggcctgtgggctataggaggaagctagagcaaggctgggggtgggaggagcctttggtgcctcacctgagattctggccactcctcccagccatttgtaagcaattctgccctagttgctcttgggggtgtctggagaggttagtgtatatacaggctggtgaaatttaaccgagggggcaccatctatgtggctacggggggctccatcatttattctgggtgaaaccttcctagtgtggtgactttggggacacttcatgctcctgcgggcaactcctcactgtgctctgtaaagaagcccaagaaactcacacgttcccaaggggaagcttgggagtcatatactaattccttaggagacatagtgacaaaacctgtgtgtgtgtgtgtgtgtgtgtgtgtgtgtgtgtgagagagagagagagagagagagagagagagagagagagagagagcatgtgcccgtgtgtgatgaacattcaaagttgacttcagttgtttttgagtgagggtctcactggcctggaatgccaagaggctaggttgcttagacaacatgttctaggctctcactccccacacctgatctttaaaatgtgcattctggtggcatttcactgacttgagttcttctatgagcagctcccattctagcctctagtcttctcaaggaagtctagtactatatagggttggggatgggggttgtttgtatttggagaaggttggaaacggggtggggggtatggggagtgcaggacctatggccctggagctgtcactaggggttgggccagctcttggtcctttctgttgtgggcaggaagggggaggacatcatgggaccccatgaaacctgggttctggggctgggggaaccctgcattgtctggaggcagagctggtggatgttcctgccacgtgggcccttccggctctgcgcctgcctaacctaaacagctggtgttcatttcactggtggctgcagagacaagaggagggaggcatccaggccaccacccttctgctcccctgggagaggtccacagggtcgagtggaaacgctgggcctcggggcaggagcagggtggtcagtgccctgcacagcctggagtgctagattgacggggtcaagactgactgatgaggtctgtcagggagcgtgtgctgagcctaggggccagattgttgagggttacatacagcctcggcatcagagacggatgctatggttccttactgttgggccaggggaatagtattcttttaaaaatgtgtgagtggagggggggtgtggggtgccaatgctttacacactaagctgtctcgctggccaggcagagaataatccctttttaaaaagtgtgtatgcagctgggcgtgatggctcacgcctttaatcccagcactcgggaggcagaggcaggcggatttctgagttcgaggccagcctggtctacaaagtgagttccaggacagccagggctatacagagaaaccatgtctcaaaaaaaacaaaaaacaaaaaacaaaaagtgtgtatgcatatgtgaggatgtcttagtgaatctgtgtgcaccgtatgcatgcaggagcttgcagagattggaagaaggcatccgatcccctgaaactggagttctgggtagctgtaagcaaccgtgtgggtgctgggaatcaaacccaggtcctctgtaagagcagtaagggctcttaacctctgagccagctctccagccccaggaacagtattctttataacatagctgttgaggtatctcgggggtgtcaccatgtcatggtgggctgtgctgtcttggctgatggtgtctgggtgtgtgtcaggggaggagaggaagaaggagaagaaagccacgggggaatcccaagtctctagagggagtggctgtatggtttgggctgtggccacagcagaataagggagaggctaccatcctctcaggccagcattccaagtgtcaggtgctcagtgggagaccttagggtggacttgtctctctcagactgcatgcaggcagaaaagggaggtggcttcctcgtgagccccgtgacatcctaccccgcacacctttctctgtccgtccttctttcctttttgactgtgttgggttttgatcccagtgttttgtgccttgtaggcaaatactgcaccactgaggtctctcgatccttcgctctttccgggaaaggttctcacagagatccttgagctggctttgaacttggtgtgcagcacaagcaggccttgaacttgagatctttccacagcctcccaagtagctgggattctccacttctcttgacctggcacctttgcccttctttaacagagaatgccagggcccctctgccagtgtgcataccatagactttctcctctctctcttccagccttaaagagatcgtttgaagtcgaggagattgagccgcccaactccacgccaccccggagggtccagacccctctgctccgcgccacggtggccagctccagccagaaattccaggacctgggggtgaagaactcagagcccgctgcccgccttgtagactccctgagccagcgctcccccaagccttccctgcggagggtggagctggcgggagccaaggcgcctgagcccatgtctcgacgcacagagatctccatcgacatctcctccaagcaggtggagagcacggcctccgctgccgggccctcacggttcggccttaagagggctgaagtcctgggccacaagaccccagagcctgtccctcggaggacggagatcaccattgtcaagcctcaggagtcagtgctccgcagggtggagacccctgcctccaagattcccgagggctctgccgtgcctgccacagatgcagcccccaagagggtagagatccaggtgcccaagccagctgaggcacccaactgtccgctcccgtcccagaccctggagaactccgaggccccgatgtctcaactgcagagcaggctggagcccaggccttccgtggctgaggtcccatatcggaaccaggaaggtgagtagaccagcactgggtcttcaggctgcgtacttgagatgggaccttgctgtgaggttcctagaagaacctgtgtctctgtgtgtgtatgtgtgtgtgtgtgtgtaagacacacactacacacttccatagaaatggaaaaagacctggatgtgcagagctgtgttccaaggctcagagcctgcagttgggaagcacctgtaggtaccaagctcctttggtggccactgccaggcctctgtctgtcatgtgatcctgggacctgaggcctgagcatctggagaggagttggcgctaaagccatgtatgctcacgtagtgcttggaataagccatgttctggtgatcactaggtctctagggggccttctgggaaccacagcctgagtgccaggtggaagcccagagttgaggatgccgcaggaggaccgtgagtccttctgaggaggtttgcacgggagttcccccgtcctgctgtctctctagtctggccttcctccctagatgactaacttctcattgctgaagcaaaaccgcccgaggacctgcttaaaggaagggaagggtttgtgtcggctctcggcttcaggggacagagtcatcatggtgtagaaagccggatggcagcggcgtgcccgaaatccggaagcagagggtgacgatctgctcccactcctttaattactatcattaattgtagcgaaatgcacgcaagatgcattggtggctgcggcggcggcggtgccgttaatggatgcagctcagcgctgctaagcacatccaagtggtgccacaagtaccacctccagcaatttccagatctccctacaccccacacagaagctctgttccccataaagcaactccctatgcctccttcctcgggtctgacagccccgtgcttcttcctggtgaggctgcgatactccgttctctctggcttgcttctcaaggccttcacagcggcctcagtatccatccatactggaccctgtgtcagaacccggttccttgaacaaactgaatgtgttataggcgcagtggaacactttctcccttgtagtgggcttgcgcttgtcaggcaagtgctgcaccactgagctgtccctggttcaggggagaatcagttcgtccactgatgtacatctgactggcttctagcatttggttctggtaaacaatgcttgcgtcatggggatgcacgtagctttttaagcccccaaccacaccccgttccttgattctctaatggttggtggacttgggacaaggctggggctcagccctttgagaatgtcaggtgtcagacctcagtaagtacttggggattcgtgaacccttgacgggtccttctgggcctgcgtctgtgcttctctccctgagtcctaaacttgacccggttgaggttgcccagacggagcatccagacctcaggtggaaggaacaaaggccctgcgcactgttgagcagagggcccagtgccctgtgttcccgccacagagcctgattgatctgggacctccaaaggcaccagctccacctccctcctgagagatgttcacactgctgagtcaggcaggatgtggttggagagataggtggctgcacccgccgcccgcccagctgttgattgcagctggtgctggatacaaagaaggtggtcctggttctggggccgggtgggaacgtctgctgaaggatgctgcatgtcttccagtgagggtgcagctcagacgccgcacacgtggttgggccatggggaccagttcatagcctctgtccttgctagcttgtgggaggacagtgggtgagagtgaaaaagctctgtggaaacctgttagggagggcaggaattcagtaggccagggtaaagaaaggtcctctgtgtgtgtgtgtgtgtatgtgtgtgtatatgtgtatgtatacatgtgcatatgtgtttgtgtcttgtgtgtatatgtgtgtgttgtgtgtatgtgtgtgtgtgcatgtgtgtatgtatgtgtatgtatacatgtgtatgtatatgtatacatgtgcatatgtgtttgtgtcttgtgtgtatatgtgtgtgttgtgtgtttgtgtgtatgtatgtgtatgcatgtgtgtctgtgtgtgtatgtatgtgtatgtatatatgtgtgtgtgtatgtatacatgtgcatatgtgtttgtgtcttgtgtgtatatgtgtgtgttgtgtgtttgtgtgtatctgtgtatttatgtatgtggtgtgtgtggtatgtgtgtctgtggtatgtgtatgtgtgtggtacgtgtatgtgtgtgtagtatgtgtgtgtgtggtgtgtctgtctgtctgtctggaggtcagaggtcaactttggtgtcattcctcaggaggcatccatcttgctttcttttctctttctttctttctttctttctttctttctttctttctttctttctttctttctttctttctttctttctttcttcctttctctctttctctctttctctctttctctctttctctctttctttctttctttcttttttaagatttatttataccattgctctcttcggacacaccagaagagggcatccgatcccattacagatggttgtgagctaccacatggttgctgggaattgaactcaggacctctggaagagcagtcagtgctcttaaccgctgagccatctctccagcccttgctttctttttctttggaggtttttttttatttatgtgtgtgtgttttgcctgcatacatatacatgtgcaccatgtgcatgcctggtgcggtagacccctggagctgcagttacagacaattgtaagctgccatgtggctcctgggaattgaacttgggctgtctagagaaatattcagtgttctaactgctgagccctttctacagcccccagtttgctacttttttccccaatcttagatatatttgttttatttcttgtgtatgattgatttaccttcatgtaagcgtgtgtaccatgtgcatgcctggtgcctggggaggtcagaagagggtgtccagtcccctggatttagagttgtggatggttgtgaaccaccacgtgtgtgctggcactgaacaagtgcttgctctcaacttctgtgccatctctccagcctgcactgtgtggggacggggtctctcgatgggatctgggctggcctgtttggctggctgggccagcaatctccctgcgtctttctgcctctacctctccaatgcttatgacacttgtgggtgctgggaatgaaccaggtccttgtgcttacatggctgtgtttaccagtggctgaacacaaggaagacccttcatggtagtctagagcccccaagatactggagggcagggcagggcaggaagaaacaaggcaagcaaagccttccccatggaggcgactggaaaatttacgtgtgtccctggggcctgtctcatcttcccccgacccacaacctcttcttcgaggtgacagcccattccctcctcctctggcccccacccgtggggtctctggtgtccctgctgagctgctcctgactgaacaccctatagcagggtcgatcctgctccctggctccccctcagctcttctctgggtttccacaccttccttgcaagtcctcaactccgacctcctgaccctgcttttgctttgttgaactcctacactccagtcaaatccctacccatccttccccataggtggacacactctcccttcctgtacctctgggccatctttgctttgtctcctgggttgggaattatttgcgtgtgaccattttcccgctgccggtctccttttcccagtgcagaaacagatttccagaggacaataagtagttttctatgcttcagaatgcagaaaatgtgaacattacgagaaaaaggctaaattttaaccataagctctcatcaccttcaatattctgccatacactctgcagaattctgtcagcacccaactggaggctggggtccttgggcaggggccacagctccagcagctgtctatgtttttagagacccctaagataaatcagtgactcggatcataaaaatcaatggtggcacctggcaggcggtgacttggaggtattttggtggccgctgcaggcacatgcagggaccccaaagcctcccccaaggggccaagttaatgcttcttgtagcttcttcccaaaggtctgcgccacatccttgtttgtcccttcagtgctgggggcagagcagagggggtgagtcgtccccagagtgcactggggagcttcagggaggagtaaggggacctagatagctgacggggaaaggcagcagaggctctctggcctctgggattgaagctctgctgtgtatgttgggttcccgttgtcatggagcccttggtgatgctgggatacgtggacagcctgctggctcagcccctctagcctcccttctggcacccagccacacttggtggctccccagactgccttataaggagggtgctgcacttgcttgccactccgctcccccccccacccccccccacccccccgctgtggtaccttgccttctctggtgctcatgaggcctgctgagttcctgggtgtgtccaggctgcacccgtgagcccaccgttctgagcacctccactcctcagcctgcccagtttctgaagcggccccccgatacaggaaggtccctggttgcttgactgggactggtggctgaccacctcccatgtgtccctgggtgatgtgtctacatcggacctagggacagataggggagaggccccatgcagacggtgggatttcaagtccattgtggcatggagggggttaatcagagcgagcgtaggttccctgagaccccagtggtgtcacagaagaggggaactcctggataggaaggtttgggctccgattgaggaagaatgtacctggggtgggcttggcatatcctacaagatgaggtgttcagttggaaagtgggtgatcgccatgagaactggcagggagataacccaggctctgcagagggctccacagacagcctttgtctttgcagggcacctacaggctgtggggaccccccctgactgtccatgggctgtggctttcctcagggtgggttaagacttacagtgaaagcctgtttatacctcaagagtctcatgggagcctgaggagcctcctgtgtttcttctggagggatctggccacgtctgcaggaaggacattcctaccaggccaccgtgcccacatggccttctctgctccttgccacagtggccaccctgtcctgggactggatgtcttcctcctaaggatgggcctcagctctccgagactcttcctacctaaggtagaacactggagggcggtaggcagagtgagcagagcagagggatctccttcaagatgggggcagagagaccctggctctggggtccacacacaattcctccctggctgcctacccagctgtctgccgcccagctgtctgcagaactgagggcgcagcgaggagggggagccaggcctctccacggatcatgatccagcagctgtggaataccttaaatagagaggaagacagctgggcacgcctgccgggggtgggggtggggtgggggggcgggtcctgttccacccctccaattctgtggctgagcctctgaccacccagcggtgctctggattgagcctggcccagcacaggcactgtgtgaccctcccacccccacctacatggagcagttgcccaaggaggagctatgcctcagcctctaagccctggacaactgctggcatccagagtctgaatggtggtatggctgttgagggtggcccagggcagatagccatgctttctctgtgtggctggacagagggcacattcatcccggaagcatcgcactgatgttcccagctgacacccgggatgtgggcagcctctgaccagcctctggatttctctggtggccagggagaatgccacatggcacatgctggccctgtccccagagcctgcaaaggaaggcatatccagggctccacacacactgcttcctctaggcctagcagcggacagagtcggtccctccctcgttacagggagtcctttaccctcctgtggtcaacagagcaggggcattgggatctgaaacctggcttccttccacttctctgcaaacactgggcacaggagagaataaaaatgagcctgagagtgcctggatggtggaagcaagatctggcacatgtgagcccatctcagcaataaaaccagtggaaacaggaggtttggggagatagctcagtggttaagagtgcctgttacacgagcatgtggccatgcctttaatcccagcactcaggaggcagaggcaggtgggtctctgtgagtttgagaccagcctggtctacagagtcagttccaagatagccagggttccaggggatatggtgccctcttcttcacaagcgctctccctctcccccctctctttttctctctctgggctagagtgatggcttatctaagagcatgttctgctctggcagaggacttgggtttggtttccagcacccacatcaggtgtcaggtgtcaggtttcaaccatgtgtactgccagcactagaggagcccagtgtctctggcctccacccagacatgacacgtaaatgaaaattaaaaaattaaagatcctaaaaacaaaacaaaacctcctaaactaataaccagcttgggagtagttggggtgccaaaaggatctggtgccctttgaccctacccctgcttctgaccacctcacttttccctaagaccaacagctctctagggaagtccttgggtggggtccctactctctgtctgattcccagagacagaaagggggcctatagtcatgacccataccttgcctatgcagaattctacctactgcctcctggtagaaaaccatcctgcacttccctggcattgcctggatcctagagtggccctgggcttacatcttcctcctgatagctcacaaaggctcctatggtagcggaggcagtgccaggcccacgggtaggctctgctcacttttgggggtctgggatcctatttctgctctgccctgtgcctggtgacttacccctctggcccatttttcttgtgttcagagtgggtgtcatccccattgggacaaagagtggggtgggagctggtacccaggagtttgtgttatgtgcatacacgaaaactgagccccacccttattttcgggagctgtaccttgcatgcagacaagaggaaacgctagaagtctcaggtctcctggtgcaagggtgtcagtgtgcctggctcccaccggctggtggacctgcatagatgctgacttgctcctgggcacctgccttctcccattcacctttctgccatgtattccaaaaagtcttttttgctcactgctagattatatatcctaaggatcccaagaaacctacaaaggaggctgcctccctcccctgctgttctcagggggtataccatgacggctggacgtgttgacgacgtttggaattttgtgtgtgcagatttgggcaaaaagtctgtgtgtagtggacagggctgttggctcagtggcggagcactagattgcatttgaagccttgggttggatccttaacatggccaagagaaaaataaaagggaaaaccctctgttttagaggcttctcgagcatgcagaggaagcggaggtaactttctgttgtttctgctgagaacgccacatgcatttgtgtccagcatcaaagggtcagcaggttcttggcagtggtgggatttgaacccagtgcctcatgtgtgccaggctcacagttctaaccccagcattagaggccgccgagctcattatgtagtagaagatagtactgctcccatcctctgctagtctcagaggtgtacacacctcacccaagtttttaatttttacatctttccttttgttttttgttttttgtttttttcaagacagggtttctctgtgtagccctggctggcctcgaactcagaaatctgcctgcctctgcctcccaagtgctgggattaaatgcatgctccaccactgccccgctaatttttacatttttattttattattttttgaggcggtttcactatgtagacctggctgaactagaactcaaatctgtagaccaggctagcctcaaactcccagaaatctcttctttgcctcttgagcgctggaattaaatgcatgtgtcaccacacctagctaaattttatttacttatggttgtgtgtgtgtgtgtgtgtgtgtgtgtgtctgtgtctgtgtctgtgtgtgtgtgtgtctgtgtgtgtgggtgtggggggtatagacatgtttgtgcaagtttcctcagaggccaaagctggattctggagctggggttatttgtgagctctttattttatgtatatatgtatatgtatatttaactgtcttcagacatcaaaagagagtgtcagatcccattacagatggttgtgagccaccttgtggttgctgggatttgaactcaggacctctggagcagccagtgctcttaaccactgagccatttctccagcccctcatccagtattttaagatgtgaaaagaacctggaatggggcctagacgtgctcacctgtcatcctgaaactcagcaggttggggactcaggagacctgagtttaaggctaacctgagctaatgtgaagaccctgtcatgagaagctgtatggaccatcttacactgtgtttgggcatgtgtgtgtgtgtgtgtgtgtgtgtgtgtgtgtgtgtgtgtgtgtgctctctcgctcgtgcaggtgactgccatgtgcaacttggaagggcaagtttctgcatcagaggaagtgtgggtttaaagtttaaccagttccacccacattaacctcaagcagttacagcacttacatttttatttttattatttaaaattctgtgtgtatgcatgcgtctttgtagggcgtgtgcaagcgagtgcaggcgcccttgctagaggtctctgaacccctggagctggacttacaggcagttgtgagccacctggcatgggtgctgggaacatagctcagatcctctgggagagcaaggcttgctcttgactcccgagccatctctccagccttcggtacatcattaaagcattttgagggatggtgaatggaaaagcatgtgctctcccctcatagtgaggggatgggcgctgcccaatgggtttgaatttatttctacagctttgtattgagcagattcatattcctacatgagacagctgacttatcaaggggaaattttgctggcatctcaggaggtttccacatccagtggcctcatggctaggagctggaccacatgctgggtgtgcatagccatagccagaaagtctgctgatgtaatgcgccaggaagctgggacccagtgaagtcctccagtctctttggagacctgtgcctggggttttgggtcccttcccctcagcactccctaacagtatcaccgtggggagcagatagttacaagctcctgggtctctgggggacatttcaccccaaaactaaatcgatcttagttacatgttttcacggtgtagaccaggcgggcctcaaacttacagagatcctcgtgcccccacctccatctctgccagaatggaaggtgtgtgttacctgtgtgttttgtgtgtatgttctgtatgtttgttacagcccaaagcccatagtcctctcttagccggactgtcaacccttttcttactgattaaaaaaatagtaattttaaaattaattattcttttattttgtaccttatgtgtattttcctgtatgcagatctgtgcaccatgagcatgcttgctgtacttgtgcagaccagcagggggcactgttttccctggaaccagcgttccagatcattgtgagctgccgtgtgggtgcagggaactgaacctggctcctcagcaagggcagccgggttcttaacctctgagccacctctccagccctatggttccttttctaagaggtttttgagctgattggtggtggtcagaccttgagaggttcaagcagggagattgccagtagttagagaccaacctgggcaatagagtgaatacttaagctggccagggctaccaagtaagaccctcccttggagagagagagagagagagagagagagagagagagagagagagagagagagagagagagagaaggaggaagaggaggaggaggaggaggaggagaagaggaagaggatggtgatggtgacggtgatgtgtggtatgaggtttaagcccccgcccccagagctgtagtgtgttcttccaagcagagaacctgaaggcttgtgtttgtctggcttctgatttttcctttgagcgtttgggtctcacatcctgctgcattccagaattacagacaagcatttcatccacattttcttctaatgtttctgtggttttatttttatgtaccagtgtcgttaatctgctggaatttatttcggtttgagcatcgtggtgggatctagagttttgggttgttggttttgttttgttttatttttattttttattttttttattttttgcacggatgcacagtgagctggctctgcagtgtggggcgtgtgccgagctatttttgctttttttggtgacagcgtggtgctggcttagcaaaaacaccctggatatgtttctttcttcctctcccttctggatcactctcacagcaacacaatcctgtctttgttaaaactttcaagttgctcactagtgaaaccatctgggcctgatacttttgtgggcgaccagcattgaaagaaaaaaaaagaaaacacttaaagttattttccatggggctgtgagtttggagggactcttcaaaacttactctttagggctgaggatgtggtggggtggggggtggggtgggcggatgctggcctagaaggcacaactgctttttatcccaagcaccgaaagaaatcaattattgtttagttgggtgtgtactgaatgcatgtaatgtaattcaagcatttgggagacagagactggagagtcatgcaactgagggtaattccgggccagcccaggctctgtaggaagacctactctcagtacatacatagatgtacatgtatgtgtgtatgtgtctgtgagatggctcagtggggaaaggtgatctcttagactcctggaaaccatgaaaaaaaatggatgcaaagaactggctctacaaagtcgtcctctggacgtccatatgagtcctgtggtgtgcacccccgactcatgcatgtagtaagagcaacagtaattttaaaacgtgtttgtatgccatgtatgcatgcccagatgtggagcccagaggggaatgcccacatctgtgacatgggttctgagagggacatgtgcagaagactctgggccttgagaagcaaggccacctacccaccctctgttgttgcaaccttggaggaaggaatgatgggaaaggaactgtcttggagtagggggagggcagtggtccaggcaggatgccaggtctcaggatcacaaagtctggaatcttccagaaagtagctgaagaagtacattttacaacataggtgtgtgtgcgtgtgcgtgcatgtgggactgtgtgtgtgtgtgtgtgcgtgtgcgactgtgtgtgtgtgtgtgtttgtgtgtgtgtgtgtgtgtgtgtgtgtgtgtgtgtgtgtgtgttggtaaaagttgatgtcagtgtctgccttgatctctctccagggtatacattgaggtggggtctctcacaaacacctagagctcactgggtctagctaagcagcttgacccagacctcctgggagattacaggcagctgaggagccaaactctgctcctcatgcttgagtggaaagcgccttccccacccagtctcttccccagccccctcacctctttaatgtacacagctgtgtgaatttctttgtcctttcctttctccttttttttgagaggaccctttagcccaggctggcctagaacttggtatctattggaagatgactttaaattcctgatccttctgattccacttcgggccgacattatagcacaattcagtgatttttctatcacaatccagacttcatgatgaccaagaccccgcagcccacgggccacctacttgctccaacacatggcttcctgtcactcctccacagccagtttaaaaaaatgtttatccctctagaaggagctgccgttctgttctgtcactgtcactgggacttttcatctaggacttccctattcatggaggcaccgctatggccttttgtgtctctcaatttccattcttgtagcccaggctagcctcagagtcactacaagctcttgatccttctgcccaaattctgggattacaggtgcaattccacactcggctacagatatagccaggcaagctaggttaactttcttttgctgttacaaaattctcaggataaacagcttttaagggagaaaggtttgtctcggctgggtccatgcctggttgaccccttgttgctgcagaccacttcatggtgggaacacaaggcagagggcagcgctcaccttgtagtgaagcagagacggtcaggaaggttctgggttctcaatatcccctttacagacagcccgctgtacccacagtttcctcacaggtgtccagcatgtggtcacaatccagactgtagccgagtgttgatgaggtttgggagtgaacttcaacttactggtttctaattcttcaaaatgctcacatcacagtcactgacagcctgaccccaccgatgcttttccgtggggcacataccaagttctctttatatttgtgtacatgtgtatgtgcctgcttatatgtgtaccctgtgtgctcgggaggtcacaggaggccagaagggggcgtcagagcctctgaagctccagttacaggttgttgtgagcctccatgtgggtgctggggactgaccctggtcctctgcaagtctacttaccatgtctctgtccctcatatcatgtctgatccacattcttgaagcagatctcaaagacattagaaacctgatgaccttatcaggccacaggggctggtttggtgcctacaggtcaggctcccttggcagcaacagaggacatggtttggggaagcctgtgtcagaacagaggtcatatctgtagatgctacagctatgagattgaagtgttaaaagggctcataacgttttacaaaggaaggaatggaggccgagagccccacacactagagctgtgaggtgccagggctgcagcggtgtccccagggatgtgatgcccccggtggtgtcatgcttgcttgagaggaggtgagaggcccagggttaaagaagaagaatgagggacggctcagctgcgggtgcctggtgtcaaggcatgcagggtcagcataggccttggggtgggctccagatgtgcaggctggagggtgccaaggacatctggaagttggtgcaaggcaaatggagcgcaggcactggagcagaacgcacggggtgtgtggaacacggaatctagacgaatggcgtcttaatgcagtgggggtgggatgtctttttccctcccagtgctggcatggaactcggggctttgtatgtgtgagacaggtgttctactgatgagtgacatcctcagctggttaatataattgtgtgtgtgtgtccgcgcacacgagcgtgcatgagtgcatgtgtatgcatgtgtctatatgtgtgcctacacatgtatatacatgtatatatatgtgtgagtgtgcatgtgcatgcgtgtgtatacgtgtgtgtatgcatgtatatgtgtccatacatgagtgtgtgtgtgtgtgtgtgagagagagagagagagagagaatgggtaggccagaagttgacactgagtgtctccctcagtcactctctgccttgttcttagagacagggtgtctcactaaacctggtactcacctgtttggctaggctggccggccattgagcagcaggatcctcctgtccctgcctccccagtgctgccatgccatacctggcttttaatgtgtgctgctgacaagccttcttgcttgttcagcaagtgctgtacacactgaactgtctcccagcctcacaacctggtattttcttttttattttttttaaagatttatttattagtataagttcactgtagctgtcttcaaacgcaccagaagagggtatcagatctcattatgggtggttgtgagccaccatgtggttgctggaatttgaactcagtacctttggaagagcagttggtgctcttacccactgaaccatctcaccagccccacctggaattttcaaaacccgaagttatactgctagacttctatggtgaacaaattttaaattttcatctagacacagaccctggccccaccatacttcagcaccctggcccgggcctgagagactggtttgaagtctagtttgcctttgaagctggggtgaggacaggtcagcagagcttagtctcagcagcctgtgaatcggctgtggtcgcgtggcattgctggagtataggaggatgagtcactttgtcccaaagcagccatctgtaccctacagctctgggtacagcaagcacagccccagggtgctgcctgacctccatccagtgcccaggctccccacagcccctaactccatgctgtggaaccctctgatttttgggtctcagaagcccttagtgtctgaatccccagtcacctcatccagagatgaaagggggaccccaacctttaactctcttgcactataatcatgagcaccaataagccactgattcagcctttgggccccaggccagttgggcattctctttgttgttttgctcgcctgcagatttcctgctgtctctaccttcccagggcattgggagatggcttgcagtagagttggggttcagaaccctatcgaaggcaggagctgtgtagctcagtaaagtgcttgcctagtgtgcatgaaggcctgggttccgtccctagcaccacaaaaacctgacacgcctgtagtcctggcacttcacaaacggaggcaggaggatcaagaattcaaagacatcctcagctacattatcaagaccaacctgggctctaggaaaagctgtctcaaaaccaaaccaaaccaaaaagccaggcaacctgcatttgaatttgggccctgatgctcctggctcaaaggcttggggcactcccatgtctcgtgcctcagattccccatttgtcaggttgttgagaggttgagtggaaggaagtgcagagaagtgcctaggcactgtgatgggatgctgagctatgcacagtaggtaggcacttagtaggtgttcggtggtatcacctctggcagggcgagggacaactttgacagaggataatgcctggaacccagaacagacatctcttagtatgtgcaggagagcgagcttctgatggactgtcaaggtgagtcctgacttcctgcctgactcaaggctgcggtccctgatccagggcaagcacttcctgtcatacgtacatctgttctgttcggtcttggcaggtttttattactcctgtgaccaagatagtcccttggcttccactctgtgctcacacgcctccaaagccatcaaagctgctctgccgaagtcacttctgctctggggctccatgagatggccaaaggggctgcccttccaaggcccctgttcaggaagtcacttcaatcccatgtggccctgcttccggggctggaccaaggcttggggcacaggccgcttttgatctgagctaagggataggacaaactgtggtaactgctgtggcttcttgttcgtttgcctctcagggctcagggtagggtcacccctgccgtgaacagcctaaatccagtagaaggccactcgtagctgctgtccctaggccacttcctctcatttgtcccttactgttctgggcagagggaagagatggagtggaagagagtccacaagagcagagccccgactgtggtagatgttcccgtgtctgacttcagggcaggtcctctttgcatacccacacaatcacctcttctaccaaggatggggaatccttgtgtgtttgtgtggacatgtgtgtgcacatgcgcgtgtgtttgtgtatgtatgagtgtatgtgtttttctgtgtgtgtatgtgtgcacatgtgtatgtacgtgtgtgcacgtgcgtgtttatgcgtgtgtgcatgtgtgtacatgtgtgtgcatctgcacatgtgtgtgtatgtgtgtttatgtatgtgtgcatgtgtgtatgtgtgtgtgcatctgcacatgtgtgtgcatgtgtgtacgtgtgtgcaatcgcatatatgtgtgtgcatgagtgtttatgtatgtgtgcgtgagtatttaggtatgtgtgtgtgcatctgcacatgtgtgtgcatgtgtgtacgtgtgtgcaatcgcatatatgtgtgtgcatgagtgtttatgtatgtgtgcgtgagtatttatgtatgtgtgtgtacgtggcagatgcactgggcacccttgtcagcatcttcctttacgtttccagacagggtattctcactgaccatggctaggttgcttggccagcaacctcagggatctccctggctctccgtcctcctttctcccatgactgcatacgtgagtggcgtggcaaacacctcagcgactgagccatacccgccagcttcctccgctgtgtcttcaggcccacactgaagggacccagcttgaggggtgacaggcttccacccgcagcagactgacccctgctggctttcctccagccctgagaggaggaagtgtctgtatttccatactggaaatgatggctgaggctggcccctgctcctggctccgttctctcagtcttcaggcctctccaggctggctccctgcagttccgctgactaatgcttatctggtgactgggggtggggtggggaacaggtccttgtcacagctggctccggttacagagggttgagatgcagcagagcaaggccccacacaatccactgtatcaccgaccaccctgatttcaggaaacccagcccccagggctcctcacggccccaggtaacctcagtttgagggtataattgtgggaggcaaacctgcctgtggggtacagtagttttccggtatagggcgaggctggggaggagatggaggaggagccacagccttggttggggaaagcggtcctttaatcccatctctggatcttcccccaggccatgtgcactggtgtggtagaccacatggttaccatggtggggagtcctcctccccagagaccctgcaaccttggaggagggccagggcccttcctcgttctatagcactgaagaacccagactgtctccagggagggtctggctatggggtcagggtcaccttgaaatccacaaccctgtttgattggctagggcaaccaacccagcctgttaagggaccttctgttcagggaagggggtggggaggacatggcccaggccaccgtgcgggaagttgaacacccaccctgaggtccctggggagcaggaagtttgcctcgccctgatcaaggcctggctcattaaatgtactcttgagatttttctgctccgccggccttggttcatcacattctcagtagagacctcggggcagctcccagccctgtgcctttgagccttgggtgccctgggttctactggtgggtgaatacctgccctggaattctggaggctctcagcccagtgtgctgttggaggagtgtctcctaggacatacatacacgtctgtcagagtcatccctttctgcctgcctgcctgagagacctagcctgcttcccctttctcttgttcgtggaacaccgtctgtcccaggggcttccctgtccctcagacgttaggaattgagtggctttccagatcttcccaggtccccaagcccttatctcaggtgggtggaaaacgttggtaattaatgtcctaactctgtgagcccctcctcctgtcccgtggactgttttccagatctgtcagttgagccccagagggcttccagcgcgtgcccagtgactgctgggagagcctggctgctgagctggcctagggagatgcatgggaggcagtgtgggccagtgagcagatgggacattttacccttgctgtcccagggtccgagtaggccgaggtctgagcagctgtatgggttgtggctatgggaatgaagccggagctgctaggctgggtgggatggcatcctggctgcctggtgagcagagcgaccctgcactgtcctatgtgtgctctgttggattgctttgccacatgtgtggggtgggggatgggcacatgccagcacacagggtccccctgttcagggtagactttggaaggctctcgccagcttactcagggttcatcatgcttacagagacgggataggctactttctggttggaatgagctgagtgttgagaccggggaggggcggggagggggtggaggatcgcagtgtggaagagatcgtataccctggcctcctccacgggatcgcctgaaaccacgcctgggtgcaggatgcagggtgtctggtctacagggactggcctcttccttttcacagcccagctgctcaggtctagcatcctatgaagcccctgggcttttcttttagtcttcctgggagtgagctctaagatgggtgtgcattggcttaaacagcacccagcaatcctgggccacctgcgactcagcccagggctcactgtggccaccccaggagcctagatgcagaagcagactgaacctagccatcccctgcctgtcctggagccagacagggcagccaggacagtagcctgtgtcctgcttcctgggaggtcagccagccgatgtggcccaggggactgggaggggaactcctggccttgtcttttcatttctaggttctggccctgagcaaccctcagagctgtgggtggaggggttgaggtgggccaagctgcggtgagagaaagaggcctggagagtttagaaaatgtctgtcctgacatagggcctggcactgatgggtaggatggtgaggcccatgaagctggacctgggaaaggggcactgacctctgaccccagtcatcttccagatcagggagtcaaggctcagagaacttcagccacctgcctgcagcccacagtataaggatgtcatctgccctcctggcttcctctgtgtggctttggattctgtgctggcatgcagtctcctggggaaagctcttgtccaacagtttccagggatgcctctgtctgcagagaaagtgccctgaggtctcctgtctcctggccctgcttacctcccagcctccccttatcctctggcccagtgccaggtggaaaaccagaataaaggttattctacatgtccaacaagctgttagcaggaacaggccactcgtccctctcctgcctcccatctggggaccactcgggaggacggtcttgcaccagcacgcagcctctgtgctaggctggtgaacacatggtgggattcctcaatagcaagcatgaggacctaagaatcatgcctcgaacccaagtagaaagtcaagcatgctggtggcggggaggcagacacaagcaggtccttgggattcaatggctggccagcccagcctacgtggtgaaccccacgccaatctttgtctttaaaaacaaactacctgatggtgctctgaggaatgacacatcagactgtcagattactctctggccttcactcacgcacacagaggaattatagcccctaaatagaggaccggtgtcggggaggctgtgtgagcatccaggtggaccctggctgtttccggtaacccatctcaaggttctcccagtctctgcatctcaagactctcctgccactcatagcccttcatcctggctacagacactcttccagggagccagctgacacatttggcctctgagatttttttttgaacagcaatgaagggaaagaatgagtaagaaagagtgggggaaggtcggtggggaggggcaaacaagctggaaagtccaaacatgtgttgtagaagcaggtgccagcatgacatcatcaggagggtggctgagggcccgagcccggctcagcccaggagaagctggcccgggaggctgcccttggctccattctgccctgcttggagtcgagagatttgtttccattttagggacagctctggaggctgtcctcttaactcccggccgcattaatagttcattaattctggatccttgctgtgttcgttcttacatgttccaagtgctgggttagtgttgaagaggaggcgcagagagagggaaccactggctccaggccacacagcttagagtgtttgcctccgagcctcagctggcaggtgaaggaagagacctgtggtttccgtagtgcatgagggggtggtggcctctgcttagcctccttggcccaacaggaggggtctctggatactccataaagtgagagcctcacttctgtggtccctcgggagagctggcaggaggcagagatacaggggaccgttggccttacttggattcgccaattggacacgcagatgctgctgtgctgtgaggccaattactgcactggtgatcttcactcctctgtgcctcctgctttgtttagaaccttcttctgtgccccgccccatattcccagggctgtcttcgaccctgatacaggatcagagctatcctctgcctgctgtgttttctgctgactctgtagcacttagctttgggaagtctctgtatgactcagttgatgtgtctataaaatgggttgctggcgtcttcctccctcctaagcctctgggaagagtctggtgagaggtgttgctggaaaccactttgtaccagcgagttttctggctgagtgtggtttggttggtagaatgcttgctcccatgcaaaagacccttgggctcagaccccagcgctgtataaactgagtgcggtggtccccgcccgcccgtagtctgagcattggggaagtgtaagcaggaggacagaaactcaggctgatgcttgactccagagtgagtttgaggtcagcctgggctacgtgagactcttgtttctaaataaacaagtcaaacaaagtgcttttcggagctgttccaggcactggtttgctaaagctcgggccagcggaaatctgggtccttctggagccctggtgctgagggagggctgatgttagggtcggctcagtgcccaggaggaagtgggaattgtccgtcaggataggagccagcctagattcccactgtcagaaagggctgggtgaccagtgatactgaatagccacccatgaacgtccgtctctgcctgtccatgcctgggccaaagcgagctcttccccggccccccagcccagtccctcagcaaactcttcctggtggcctttcctcccctggagcccctctggcctgcaccatgtgaccaagcacaggaggaagggcccagctgtgggaggtcatgctggccagggactgagtctacaggaccggcctcccaggaaaaccagctgcgtgggaaacaagccagcagctccggaagtctgtgtgatgcagtctggactccaggcctgtcaccgtgacccactcacggctttcgtggctcagcatcactgtacccagtcaccagccagcttgagagagacttgtatgtgccaccgctcaggcccagccctccctatctacacgggcatctcctgcatcttccagtccatcccagcacaggctgaggagtgtcccagtggcaggaagaagcttccggcctgcacttctgtgaggcctaaagttatttgccagatagatcctgagtctgttctccagcccctcccatgggtgactgacctcatcccacgatgccccctgcagtctggccaccccaggagagctagcctctccaggtgatttgtgtgaagggcgccccctggcagcgggtagtggtctcacatctgctgagcggccagccctgcgctctgtgcctggcgtgtctcctggtccacaaaggcttgtcttcacagctgggtgtttgtggtgcctgctccttgctggagagagatggatccttccttttcctggctgcttcactctgctgccagcttcagggccgtggcctcagagggcccttcctctcttcagccaacacagctggagtccctgccctgggaggctgtccgcaagcagtgttgaggacctggcagcccagtccttttgaactttatttttacactttatttagcgtgcgtgccatagcgcacctgcagaaggctgaggtagctaatggggctcagaccctcctgctaattgtcagacttggctgcgagcagcttcaccccctgagccctctctctggccctggctgtgggtgcggggactaatggcttgtcatcattcatgctgtgtgaatgcccttggactactaggggaatatggtggagatgctgtgaacgcctgaagaagcagtcagagagggcatcctggcagaagcggcagcccctaaaccatgaacaggggtgataaccatgggaaatgcttcaggggttgacctggtcccagaggatgggggaaggaagaggagagagggccagggtgggcctactgcccccactctgagggtggagggtgaggttgttctggaagccacagaggaggcaaacgttggttgtgcgtgcctgcgatccctgtacttgggaaactgaggcacgagaatcgtgagtttgaggttagcctggactacacagaggcagaggcaccctacctcaaaaacaaaacaacaaaaaccaaagcaaacccgctctccacacctgccatccaaccgttctcggagtgcgtttgctgtagctataggaggtgcctacctcaccctcctagtgtgcctgcaagactcatgagtcaagtgtatttctgccacagggttggctcccgtccctggctcaagccttcatgtattaaggattctgaggccagggggcaggcttgtgctgtgggtaggcactgtctgcctggggtgaggggaagatggtggagaggtaactaagttgccccatttggcaatcccgtactgttcagatctgggcaatgcctgttctgtagttacaccgtcctggttctactatggagtctgttgggccacacagcacactgtctggtgacctggacctacccatatttctacccgagcactctgatccgatctggtctgcatgccttatcaggatcacggcagtcctaccaacggctgctgcagacctagccttacctgttcccccctgccccatttgccagtcattgagcccagctgtctgcaccgtctcctctaacactcttagaaacttaggaggcccagattggctgagtccccggcccatggtcacacagcaggtgcacggcagccataggatccgaatcggacctttgactcaccagaagtcttgcagcaaaggcatatggaaggaagccaggcaaagaacagctatggtggccttgtgtcagggatagtgacctgtagcctgcgctgtgggcatgcagtcccactgcagagatgatcctgcggtgagagaataagctgtgatctctgggtttctctgtgcccacctacaaacagtggcgcttcctggaatcttctggtcccctgtatggagcctatacaaggggcctaagagtcccaaccctggctggtcggcggacaccatgctcaggggtcagtggtagaggcaggtctgtggttatgcttcttctcccgtgaggacagagaccgtgggttgctctggtagggttaatgtcctgcacaccggtctctaagaagggtgtgtccctccccacctccttagctgggagtcaggcctcagtccctgccgaccttcatcccagccagagggagagacagtgacattggagacaggagctgacccagtgagggtacaagccaccctcccttagcgcagggcactccaccccaccctcctctgcccaagcctcagtcactgaagccagcagaactctcaggagcccctggagggcttgacccagaggactccacagagctggccttggacagcctgccctcctacagcttggggttcccgccatgcccgcatttttcctggggttgtcatgcctgctggggtggaggaaccccagcaggctgcagatgaatcagagaatgttgacacaaaccctggctgaaccccagggctctttgcagccagcggtggccgtgttggaattgggaaagggaccacggtggcgcctgccctacatccagttcttggctctaggatgtttctgaagagtgattctcatctcagagagttggtggggaagactaaccagcccaggcctgccagcggctctggccagctgctatttgtcaggcgaggccgggacggacgccagggctgctggaagtgctgtcttctcattggaaggcccctgcttttatcttattattataattgttgttgttattattattattattgagacaacactctatggaccaggctggcctaagactcaaggcaactctcctgtctcagccttctaaatgctatggggttgcaggcatgcgccatcccactcagcgggaattttaattcttttttttttttttatttgaggtgggctttcatgtagcccaggctagctttgagcttctgatttccctgcgtctgcctgctgagtgctgggattaacttcacgagtgtgcaccgccatgcctggctcgtgccgctatgcatgtgtgtatttttacatttctttatttgtgtgtaagtgcacacgtggacatcggaggacaactttagggagtagttctctcttccagcatccgggttccagggccaccagcccttttgttccctgcttgttttggctccattaggacatgttccatacaccaaactgtctttgaacttatggtgatcctcctgcctctgcctcccaagtgctaggattacaggtatgcaccatcgtacacggcttgggattttaaatttaggttaattttgtgtttgtttgcttttagctttctttgaaatagactctcctagcctgggccgccctcgaactcattatgtagctgaggttgtgattttattttggtgatcctcctgcctccatttcccagatgctggggctacttgcatgtgcatcacgtctagtaggatttttttacattttaaacaaatgtgagctcccgggcttctccccggtgtcacctggggatgctccatctattctttctgctcagcttggaagcaagtggggatgttctcagcagaggccgtggggtctgagctaggaccagtgcctgctgtcctgtgttggttgagcaaaccctggctaggggaaccctggcttgctgtccagctctgccatgggccaggtctttctggcaatgacacactagccaaggtaggcatctctgtgtaacaggttcatagcagcacctgctcctgagaccatgaggagagacggatgagtctgcgtgatgtggcctcaggaagagtgtctgacctgtttgtcactgccagcagatacagcaagagctccctttgttgtgtctgtccttcttgccctcctcctcagccaggcatccatccctccacctacccgtctgttgtccacccgcccacccatctgtccatccgcccactcaggctgcagctgagatgtgggaatgttgagccaaacgcagaacaaagcgctgctccctggcttcctgtttccggctggaatgtgaagttcttggagactcttgctgtgtcacctctgtcctcggggtgggtggacagaggaaggctctcttgtgctgctgctgctgctgctgcatgtcagcttttagctgcttaacccttctgtgccccagttcctgatctcactgctgggggcagtggaaggattgagtggggcttaaggaagtgggggggatggacaggaaacagtggctcttaccagcaacttgcctggtagtttcccttctcagcttattcttggatctcaggatgctgacaactgactgctctccctggcagccagctagcggggtacggacagaatcccagggacggacggagttgctgacttgggatctgagttgccatctcggtctctgttctcacagagagcagccggctgtgtttcctttccccgggagcccctgtcccttggctctcagaggggactgtccacttaagcactgccagttcaagtcagaggatcccctcccttcccagggtgcccaccaccgtccgtagctggatgcgtttaggcttccggcagcagaaagccggctccagatggcttcagccgcaagggagaagccatttgctgaagctcacaatgagctgttcctgagcccaggctgcccagggatgtcatgaaggaccccctcttcactgtccttggccaccgtgtgaagatcctccttctgtggggatcttcactatacggaaggaaagagaaagccctccgggaggcccagggtgcacagctgctgcctgttatctgacaccaagactgatgtcttcagcccctagcacatgggggcctgggcaggagaggcaggggcagcatctgctcagatggtcaccccgccaccgggggagcaagcaggacaaggccgcccttgctctggccagaccagagtaagaccgagtgtcatttagctgccacaaggcacagggctccagctgcttcccaatcaccctcgagcctgacacggcctccccggaagcagcagctgtgccctgcgctgtgactgactcgtcggctttctagggcctgagagcggttgggctgagactcaagtgtgaccagttgcccacagtgggctgagatgccaacaccatggagatgagcgagcagagggagagaatcactgggctggcggcggctgattccctgcatccacaggacatcttttcctccttccagggtccccagcccaggcactggcccttcgtgttgcccatggggcttgctgtgttgctctaacggtcctgcacatgctcacacttgccatgtgaaatggtgccatgtggtgttgattaagcccttccttcagttcagaagacccctgacctggagtataccctgtgggactccaacgccatcttgctgtccttaactccatgtggggagagtttggtcacagcagtcatctgtcacctgtgcattctcacttggctacagctctcaggtttgccttttgtgggctggtgtaccatggtgtgactctagggggcctgtactgtgtaacagggtccttccctccacagtgacctgctgtctgtatagtctgtctgtttctttgggacatgactgtgctgtggagagcaagatcggctggggctctgcctctggccccagcatgtggcagctgtatggctggggacagacacttttgcatccctgtgtttctttcactccaataggcccctcagaattctgggtagagaggataacctttcacctcagtgggactgcagaggctaacagaggatctccagggcttcatggcttggctcacccttgtctgggtttgtagattgcagccagtcaattcctgttgggctgcactctcccctcattggtaggccgagccacgtggccactggaggcagaaattcgagggcagctgtgtacagtacagggccaaggctcaggtcccagaatgccctgggcaccatgactagaactgaagcaggggagagaagcgtgggtttgaggaggtcagagagtcatggtgctatatcctcatatccggacactggtagccccaggggtccctgtggtctctgactcagaaaggtcacctcttggaactaagactagactccagctgtggctgcttctagaacaggcagagctcagaggaagcggggaccttacctttggctgccagacagttccgggcaccaaccgagccagctcttctgagctgctgagctgagctgaggtctgtcggattcatgtggctgataggcattagagctttgtggtcccaatgtgtttaagggccctttacctacagtaagcacctccttgaatccatcggccctgtcctattgggtctttgccattattagtgtttcacagagaagggatgaaggcacagagaggtctcacggctgttggctaaggcaaactgatagtttaaatttgggcctcttccctaagctctgtcactggcttagtggtgtgggaggtgtgttattgatgattggtttcctagctttctctgctgtggtggcgtgcacctttgctggggacaggaagccttgaggatgtgccttgcacgaaagggttaacgaacacacacacacacacacacacacacacacacacacacagagagagagagagagagagagagagagagagagagagagacactcatacacagagctttcccaggccagagccggaacagaggggccttatctgcagaggaaggggtgggtgggatgtgggactctgcaggctcctctccactctcagcttcagtaccttctgtgggccagctgttcagagctcagtcagagggcggagggggacccagcaatgtgggattcattactgggtttggcagaagactgaatcccctgaggtggggtgggggtgggacctcctggagtagaggtctagaatgggggaggggaaggtcgtttcccccacccccaagttcccccacccctttccttttcctgcgcttagagcagctgtctccactgatggagtctcttccctgaaggggtgtggcctggcctctttggcccctgccacctacagcctgttgagctatagtggcctcttgggtggaggccgggcggaggacggaggacagagggcggtgagcatcagttcctctgccttgggagtaactgaaagcagcactggggctaagtgcagaaggcggggcccactgtgtggggcagagctgaagagtgtcccggctgcgtgacatgactacacctgctgtttgagcacttgggaggcctggatgacatagcccggtcccaggctggccagagttacacagcaaggcactgtgaggagaaagagaaagcccgagtgttatgaggccggaggaagtgggggtggagggcctagaagctgattgtctgtgctgattgaagataggctacagggctaaagcaccgtagatgaggctcaggcacacataggtcgtgtaaaaccacctgtaggaataggaccagagtggcaaagtagctttccagaggtcacacagcttagccttggtgcctcactcatacaaatggttcctgttgtaattcagagctccttggccacacctcagtcaccaagccccagcaaggcctgatgcagaagtggttggagcgccagaggcagagagaagtgagacctctgtagtagccctgagcctggggcagagcacagcactgccccacccagacctctgtgggggtgagtgagcaggctgggaggggctggcttgcacgcatgcacgaaactgactgttctccctctcagatgggacccaaggcctccctgcctgtgaggggtggggcttcacaatggttctaatgagggacctccataggtcagcagtcacactactagcaggccaggtaccaccccaggaaagcctggaatgactcacacatccagagtggagaatgtttgtgagtttttttttccaaaaagatatattttgtttaaaatttcatgtgtattggacaccacgtgcatacctaatgcccacaggggccaagagagggcatcagacccctcctggaactgtgagccaccacaggggtgctgggaactaaacttgggtcctcagctcgagtggctggtgctgggctgtgccatctctagcatggaggactccttttaaaatactttattgatttattattattattattattattatttgtgtgtctgtgtacatcatgatgcacacatggaggtcagaggacattttttcttttttaatttttgtccccaagcccagaggacaattttgtagagtcatttctctctccacctttatgtaggttccagggattgaactcaggtcagcaggctgctgtagcaagcaccatacctactgagccacctcacttaccagagagcctcactgtcccccaggaatattctcctgcacacctgtggactgacacatcttgcctgtggggcagccaggcgcctgagaaagcaagcattggccatggccacgccccaggtcagaggtcacattgggagcaggatgctgacgaaggctgattttttttttttggacagggtctcattatgtagttttggctgtcctggaactcattatgtaaaggtccttgcacccttggcttgactgtggtgtggaaaggatttcaggctgagcctgtgcaaattagagttggtgtttattaagactccaggtttgagcactggagtcaacaagtgtgggtatgggctacttaagagggccctgcttaggtgtctttccgagagccatgtgtctggtttttctgaggaagacaagtctactgagaactgaagtcgggtcctactgtggtttcacagggttagagctgataaaacaaaaccctgggttacagcccagtaactcagtactacccggtactcagtactacccggtactcagtactacccggtactcaggggttaagatcgtttttattgaaagtgaagttcatagtcttgtttgtgagattcccagaaatgtggggttcacttctgggaacagagtctagccatactcaaagggtgtacacgctcaggcccgaagctcggctcattgctaattctgcattcttattcaaaaatatctctctataaaaggaatgtggtttccttgttaaaaccgtcaatgcaatggtgttaatttcccagaaattttggaccggagacttcagactccagagggagggctccctctccttccaatgtctcttcaaccgtgtggctttttatactgcctgtcctatcccaggacctcctggctggggagcccacagcatctgctcactgtatggagagcagggctgtaactgcccaccagtagggtgctcaggtgttcatgggatacgccctgcatacatatgggtgccttaccaggtgtccaagagagatggtgaggtttgagagccactctgagacaaaggacagatagagatggtcacagatctggactggctccagatgccatgcacaccccccacgaggcagcatgagggtgtgagacaccacacctcatcttagagatcacagggattggagcccaggcaggcaaactcaggtctgtggtccaaccctgacatatcttttggaatcagagtcacccatggccttgctccagagtctggggagtgagactaaaccgtactactccaggggggatgctgttgtgtagaaggcagccctaagaagaggaccctgggagatccatcccccccggcccaatgctactcgagggtccttcacaatggggctggagaggtgtcccagctttgcagtgtgagaaaggccaggccaaaggaaaaggaaggaccaagaatcaggaaggacaggtagaaagtgctagaaaacagattcaacccagaacctgcagttaggaacctgtggacaccctgacctagttcagcttctgacctctggctcagagagatgacaagctggtgtccgtccattagtcaccaaacacacagccaggaaggtgaccggattctggaaagcctggaggaattctctggtgtgactgcagctctggaactttctagatgcttctagattactaccagctcaggctggaagacagtttcccttcccacctctggtgggaaagaaactgggaacaaaacttctagttccccttttcacaggtggagaggcccacctgtttccattcttgacttgggtgttcttctcaggcttgcagttatacagatagggtcatgaaaaggtcacaggcccgagttctcactccttatctgaaatgctcttctccctggcagcaaaaagccctcaggatgtcagtcagtgtggacagacccgagacccgcttgctgcgtgtcattgtccacaccccccatcctcactccacccgacccccagtctccctctctgagccccacctgtggaattctgctggctcctgtggctgaagatgctgggcctgtgacaggaggtgcccgtggtccattcctcccttctcggagagctcgctcttgcaaagctgggacaccagtggccgtgagatcgcgtctctctgagttgagcggggagtggatggaccagctccatgcagcccagccactgtgatcatcttgtcctggactggacatgccaaggggcactctgacacttgccaccgccatgtctctagcccttcctcctccctgataccctggagggacttccccgggacttgcaaagcctttgccccttcaagtcccttgcttatgaggtctagatttgaaaactcttgttgcctcaagtcaccatcttgtgccatcttgactctatcagctgtacatggtacaagtgtgtatgtgccagcgcacttgagtggaagccagagagaggggggtgctctgtcactctacccttgaggcagggtccctcactgggcctggagcaaggctggcagccagggagccccacgatctccccatctctgcttcccacagcactggggttctaggtgcccgtgtgacttttatgctggttctgggagtcaaactcaggtcctcttgtttctgtaacaagtgttctcacctgccgaaccatcttcccagcctgtcgtcttgacttctgtgttagggcttgcgtctgtgaggcacccaggtctccagcctttgtacacagggttgaaattctcagtggggacaatgttaatgcttttgcacgtgacatcaccatttcaagcccagacacacatagctggcaggcagaagtttctacttactcctgtcttgtaacagggaacattggtctgtgcaggctcactgccacacccttcttcctagctgcctatgaccacgccctccaccctccaccctcctccccatcccaggaggcggctgttcatggatcctccactaagccagtctgcccatggcatcttgccattctcccctaatgtccgccttcctccctagcagatgagaaaccccctcttagagagtttcgcgctcgcccagttgggactctcacactcctctgtaactcataaacagggttggtagccccgggccaggcacattttccacagaggatacagaggttacccaagggggaggtggcgagtgtcccagctctgaatgataccctcctagggtctcattgctctcagccgagcgtagcgcagccctgagaagagagagagtgtgtgtgtgtgtgtgtgtgtgtgtgtgtgtgtgtgtatccacatttggtcctaagccagcagttctcagtcccagccacacatccaggaagtctcctggatgacaggggtcctgccctctgttgatggggggtcccatcccctgtaggtattacatgggcagtgctgtgtggtttagagtgagactttactgagtccatttttagagcccaaagggacagctctcccttcctgctccccactctcatcacccaggcctggggtgcctttgaacacactgaaacaggtagtttgccttaaaaaccagcacctggccgggcggtggtggcgcaagcctttaatcccagcacttgggaggcagaggcaggcggatttctgagttcaaggccagcctggtctacaaagtgagttccaggacagccagggctacacagagaaaccctgtctcgaaaaaaacaaaccaaaccaaaccaaaacaaaacaaaaaaacaaacccagcacctgagcacctcaggtatgtagattctgtcctggctgcagggtgggaaggcgaggccctgtcctgcctggtgtccccaatctgccacccttctctctacaccgaggagcccacagggctagacacctggatgcttttagcctcgtctgagcagtggaaatttgtgggcctggtgggggtttggctgcatttggtcggggtgaggtgaagggcctgaaggatggggtggcagcgtgctagagttgatctacaaggtagggtggcaatcacactgaggtaagacagttggctgcagactccagggtcacacctcaagttaagatagcatacagtgtcacagaagacacgaggcttacgaaggctgacacgggttttgtgagtttgagacaaggtcttgctgtgtagctcaggctagtttcagaactcaatcctcctgcctcagctggaatcacagatgtgcaacaccatgccctgcttaatgttagcttttcgagaaggaaaaaggcccgcagttgggtgctgctctctgactggggtaggggtggggcttctcagaaagaaggaaatgggcccatgctgcctagggccacagacttgctctgaactcagttacctaggaaaccaagagggggcagggcttgctgagttagcggccaggcctccaggcctcggagagacccaggctgggggtggaggagtttcacctgtggtagtgaatgaacggggagagtgctccctggaggtggcgatgtctgggagaccatggaggccaactgaggaatagggttcttaggaaacagtgctggctgaggttggatgtgccagggtgcaggggtactcagacccaaggaggagatctactgtagtactggaagttgttggggggggggggggaaggagggagacaggaagtagacaccaccgaggaatcgaggaatggttggttatagggccaccagctgcatggggcgtggcaggaaggggctgctgtaaaattgcaaaagctaagcattagggctggggggacagggccctggaatctgaagaggaaggtcccaggactgaggggtgcaggcagggcctgagcagtaggacctagtatctcaggcatgtgggttctccaggaagaacatggcctgtagagggaggaggggtgtggcctcagagaacccactggagagatggatcaaagctgggcaggggttggaaccagaaacacggaagaggcagaagggaggggagatcacgcccggaagccaaaatgagatgtgaaagggaaagagatcccaggatggtcccgcaagggctgcctcaggctgggtgtgactggagatgagccagtggggaacctcccagagtgagtcctggtgatacatggtgggcagaagccagatggccagccaagaagtgagtgggtgctggaaagaggggaacatgagtgggccaaggggctgggctattgagagtggacagttgggggaggcagggggtcagagagcctgcaactctgctctggagattgggctggcatcagttcacctgggcccagacaggacctgaacacccagaatccattgcaagccactgttttcagtggtaagatgctctctaggggcctctcccccctccctccctccctccctccttaatcctgcttctggccttccctcaaggccatttggcagtgtctccccacctcggggacgtgtagccttgaaggtacatgtataggaccccaggacacccatacttgccacacagcaacacttgcaagtaccagccctgcctcttctccagcgctagaccctcagaggggtggacggggggaggggtggtgttgttcttggcattcagttggaagcatctgctgtactcctgagctgttgcctgggtggctggaagaccgtgggcaggaaggtgagcattgtgcctaaccagaagagaacaggatgcacactcgtgcgtgcgtgcgtgtgtgtgtgtgtgtgtgtgtgtgtgtgtgtgtgtgtgtatgtatacacgtggaccacgaccacacgttcatttgtctccttttcctgctggcttggcactgcatgtagagttgagcgtgggtgtcctgtgcttcctggcaggtgtcaccctctgaaataagtctgtacgaggctcaccattgctttcaggggaggtggagacacctctggtatcatcgagaaggaccttgtgtgctgtccccagagcctgggagcccttgcacggactcagcggggggtgcagtggggagtgggctttttagctgccacaccttggccaggtgcctggaaagagggaggggcttcatcagttttgggataaggcttggtagatgtgagcccggcttggaagtaagatcccaggagccctctgaggatccagagggatggcttgagagtgaacctgccctgctgcctaacctttaagttcctgtgggccacatgaacttcctatggctgtgaaagtgggtttgtgcaaaccgtgtagcttgtacccacagacatttattgtgttagggttatgaaggtctgaaatctaagccagattgaagccagagtgtggaaaggtgggttcctgtagggcctccagagatctgtccctggcctcttcttgctctggtggttcctggcacctctggcttgctctgatgatctctgcctctgtcgcattgtggtcacctcatatgctaatcaggcctcctctgcctctctgtggtccgggacacctgtgattgtggctggctcatctgggtcacactctatgtcactctgtattcagacccaaaagttgccttgatgagtaaagtcatggcactttcgggctgaggacaggtcattggtcagcctggtgtgtcttaagacgtgatacttctaaggcataaaaatgctaaaataaattgggtcaaggaaactaaaaatgcatctacttctttaaaaaattgcttttaaagatatggtttcctgtattgcccaggctttgttccaaggctggccttgaactctgatcttcctgcttctacctccagaacattgagattatagggatttgccaccacaggtgggttgtgtggtgctgggaggattgaacctagggcttctcgcgtgctagcagggtgtcctaccaactcagctgtgtccttagcccaacttccaattctttttttctttaagcacatgtttttccagctgggagtggtatatacctgtcatcatggcatcggggaaactgaggttggaggacccagagtctgggctatcctgggcttccaatactcgtgcaatgtaaagcagtccccccacccctggtcgtaatataaatggtcttggttctgaactgcctgcggggtcttttcatctcatagagtgggaaccccacatcctaaggagccagcacccttggtagccagtaatctgctcgctctcgctctctgaatcattttttaaagatttattttatttattatatgtaagtacactgtagctgtcttcacacaccagaggagggaatcaggtcttgtcacagatggttgtgagccaccatgtggttgctgggatttgaactcaggacctctggaagagcagtcagtgctctttaccactgggccatgtctccagccctctgaattatttttaaagtgtactcctatgtgactttagaataaataaacacagcttggcgcgttagctgttggaaggctatacatggagcggaagccaaagtgtggatggagacccaggcaccggaagggcaggagttgaagtagcctgggtgtctgtcacctcctcctctcttgctcttttctgcttcggtacccccctccttctgaatccagctgatgggaccctggtttgcttccttcccaagtcttcctcacgcccaagcttcaggggcctctacgcagaaatggctctgagctcctcagccctgggtgtctggcaatgcacagtgagccaggccagcagctggctccccctgggttgggctccttctcccatgccccttcaagccagtgtgaatgagaagggacatccaggagcgagctgatggtgtctttggcacagtctacatggtgtggggccaggtattcattgagttgattccttacgacaaactcccctctccctgacagtgaacctggggacacggctctgcatctctgtgatttttattttacttttttgaagcctattgttccacatagcccagactggcctccaactcaccatgtagccgaggataaccctgaactcctcctccacatgctgtgttgggattacaggaatgtgccaccatgtcctgaatatgaagtgttcaaaccaaggcttcatgaatgtcatgtaagcgctttactaactagctacttccaccttctgaggggggggaggaagggagggagggggagggagagagatcaggtctcaagctggagagatggctcagcagttaagggcatttaccgttgttccaaaggactgaggttaccccagcatcacagggccgctcacagccatctgtaactccagttccagggggatccaaccccctcttctggcctcctaaggcactgcacactcgtagtgcacagacatacaggaagttaaaatacccaaatacataaaataaaaataaataaatattttaaaaaggacaaggtcagccaggcggtggtggtgcacacttttaatcccagcactggggaggcagaggcaggcggatctctgtgagttcaaggccagcctggtctacaacgtgagttccaggacagccagggctgttctacagagaggtcttctgtagctcaggttggcctctcatgaacctgaggctggccctgaactcctgcacctcctaccctctactatacgtggctcctcaatacccttttaaaacctttgattggttgaccgactttttttttttttaaaagtatttgcgtgtgcataggtcccttcacaggagtacacatggccccttggagcttgcgtcccaggcacttgtgagctgtctgacatgggtgctggagaccaaactcccagccctcctctggagcaactgaatgtgcccttaaccacagcccctccagtccctcaacaggaagcatggctttcatgagctgggttctctccacccctaaatgtggcttgtagatctggtactacaagtggccaggctctccaagaagacttctgagtcagtggctctgaactgagagcagtaatggggtacagggtagagcacccctctagccagctcatgggactgtaatgccccagtctagggccggtctgggcaatgtggtgccagagaaatcagaggctctctggattccagtgtcttagcacggaaaggaagaagtatgtgaaatatctctgccattttcacgttggtgacatcttgaactgataatattttggctctgtgagatcaattaaatcgggccacgtggtccctcctgtcgtcctccccccacccccagtggtagcagaagtttaaggttccatctgtaacttgcatcttgggctttgtgccagcgggtctgatggcacttgagtggctatcaggctgcttccttggggatggatgggatggcctgcttgggaaagaagcctcagaaagccccaccctgcccccttcatgctctggaggacgcctctcccccatttggtgctactgaatgagactctgagctgcacaaagtcaccatgtacggagtgccatgtgctacgcccaggctggcaatctggaaagctcactggagctgagcacaggggctcccagagagctggaggattagtgtgtccaaggtaaaggttcagaagagacgaggccctgtgtccctagaaaggagaggcagtagggcagttgacggtccgttggtcagctttgacatgggttgataggagtccctctactgaactgctggggccgggctgggtgataagggaggggtggagggggagcgcttcctggtttgaatggacctgctgatcaactgtgactggagttggtgtatcaactccagactaggaaggcagattcctaagatgcggcgacctggggaggcctggggctcctatgttctgctggtaggtagggcagagtcacgctgaggatggaataggagagtgtgcacacacgaggctctggggcattcgttcctgcagactgggggatggaggtcacatgggagaaatctgtcactggccctaggcccctccagagttactaaaggctcctctccccttgaactaattgcttctgctcaaatcttacccccagcactcccagtgtgggagctggcctggggccaccgtggccatgcctgagcctgggagtgactcattccaggtcagaggttatagggtctggcagatcccagcatcccagcatccaggcccagccccagccccagaagtatccgctcctattctttggaccccctggctcatcactctcagggtcccagaacatcatagggcctgcaaggagttgggggaggagactactgactcattgcccagcccccacggaggctcaggaacagtgggaagaagcaggcgccagaacacaaccggagtccctgaggctccagaacagagtcagggtgagccagccccagcccagccccaggttctggcttcctctcttgcttctccctcctttggttgcagccagcagagcccacttaagtaagttggtcgagctgtctcagctgcccagaagcctatgggggggtgaggggattgggagagggcggggcctaccaaaacactgaaggctgacagaagaccaagatgcatgcctgttgtctgacgggttggggtagtgccaggccagggtaccatgtgcaggttcaatgtaccatgtgcagggtcaatggaagacccttctggctgggaagagggtgccgtgattctggattggcacagacttgggcaaacatcggttaaaggctagggctgcatggctccaaggaccatactgtaactctctacgtaacagcgcctccgcggataccctgtcattttcctcttatccgcagacttgccctgctgctgtcgcctgcagccggtgcacctctccccgcctcctcgtcccctcgccctgcccctcgtagcaattccccagcaagcctccctccgcaggccgtcctgagccctcctacctctctgccccacactctgggaggctccttgttccgaggccacaaagcccctttgatcctctgctcggctccgagccatgtgacccggtgggcgggccgcagctctccagcgtccaggcagcccgactttcagctgctggggtgagtcctcgctctttgttcttccagcccctcacagtttgctccgggggcctccaggtggtggggcccgcctggccgccccgatgggtgcattgggactgggatccgggtagccccggggcctggaactctggttggcagaccggccctgggttcctgggagaataggcggcgggatgccgggtctccacgcgggaaccagattttcgatcgcagaatagaagaaaaaggggctttgtgtgaccacagctatctctttgtgaatgtttggccaactccaccgagtggtgaagagtgtcttggagcacgttgcccccgcaaggggctctctgacttctagccggggcaagagcagaggtgtattgaaggcttcttgcaaaaatctctccacacagagttatcagcttctaatagtgggcggtttccaacgctggctggaaattagttcctgcgggctgttacaaaggtggcatattagagaccacaggggtgcactgtggtgggataccaccatcggacccttgtattctctggcttttggtgatgtgctgagcccaggagggtgttgctgggtggggtgggggtttggtatgcatttgttttgctagagaatgtgcaatgggggtgtctgccttctggagccttgtgttggaacctgtgctctgtgtaagagccaggggcaagcagtgtcctacagcaggctctgcagccaggcggagacgagaacctgggccagcacagaatggtcacttgcatccaagcacagagggaaagagggaaatgccttcccctcctggagaccgcctgagtttccgacctactgtgcgcacccccacccccaccccactctaaggaaaagctgccggctcttggtcagaagtctgtagagaagatctgctccccaagagaagtgtgagattccttttcttagagaaaaaatgtatcacccggaagcagcccagtagtgggttctggccgctctgtgctgggcagagttggaatttggttcagatctcacgtggaaagcccagaggacagtgaagacgggatctcctgcaatgacgtaggccccccccctcattcactctctgtttctagcatcatggggcccttgggtcactcagctcactttaccttagtttcgcttggcagccaggcagctcctttttagcaaataggaaaactgtgcttattaagccctctggatgggcagccagcctccaccccaggcctgctggggaggcggttcacccttctcttcttgggcctctttcagggtacgaggtagaggtaggaggcagctttgaacttatggctgccccactgtctcagcctcctggatgcagggattctaggtgtgtacctttaaaactttggcctctgggaaggaacctgagttgtagctgacctggctgactctttcggtttctgggcattctttattggtttaccccaggttctgttacatctactggagcctgttcatatgtctaccgggtgggccctgtggtcatcatggtgacagctcagccggtatgcacaagaacctactgttcgtggggtgaggtggtagccacctcggtggaagccagctccagaaaggaggccaggttcccagtgtggattgtcacaagaatgagataagtctccatgccaggtctaagtgggaccatcttgggcctgtggcgtcctctgactaccagatccactgccctccagctctgggacatgggtcaggagtcccctacccattgggcaaccacagtgctcttgcctgtcatccccgccccctcccttccctgccacaatatcctccccagcttcctgttgtgtcattgctcctgtcagatagggtggctctgccggggctgaggcccctttttacagagagggccccacagcctggggcaggcagcacagattccctgcctgtgtcaaaggtctctaggaagccagcattgaagctccatttccggtcttccattcctccacacagtaccgtctctactggctttcccacaccaccccggaagtttctaggcttcctctctcacttgctggccctgtgtgtgggaagaacagctttattttaatgcatgtaggcaaaaccccagtggccactggcagaggctaggtgggcctccttgtccttaccatcccccttcctccatagactaagccgatgttgccagttgagctttaggaaatggtctgggagtggtgtcccacccagagggtcccacttcctacagtttggtcttttgaaaagtttccagccaactctacccttcgctctctgggtaggctctgaataagctctgagggctctcccagactctctgccttccagcactaagctttgatttgtttattgagcaccggctccgttcctagggcaggtagggacctgccctccaggagcggcagagccttggactccttcccaaggaagacttctcagggtggctgctgtgcagcgtagcgtcctgtgtgttctgtgagtggggtggggctgggggctcctacctgcatctggggaggtgggcatttctgtactccacacctgagacctccacctgccaggtctctgcagccacagctgcagagtctccacccggcccgcttggctgcatgctcagcccaccttggtgcctgagggttgggtgggcctacctggttcttcctttccattctctgtcacgcatcctgaggagcacaccatccaggctgtgagcctaggaaagagagatttgcactaaggactatggagcctgatcttgtcttcctgcagccctggagctgcttaatctggttctaccacccccacccctctgcagcagagctcaccaccactgtccccaagtcactggcaccggggttggggtgtggggcctgggcatactttaaggcaggatgcagctcagtgcagaagcccttgaaagacacagaggcttagagtttgtgagaaggtcatcaggaaaagatgctgttgtgactttattcccagcacttgggaggcagaagcaggcagctttctgtgagttcaaggccagcctggtctacagagtgagtctcaggacagccaagtctatacaaaaaaccctgtctcaaaaaagcaaacaaacaaacaaacaaaaatgcttgctatcagccttcacagggtgagttctatctactccatgtggtagccgtctcctgcaggctgtcccctaaactttacccatgcgccatgccatgacacatgtgcctgcacacagacacacagacacacagttaaaattgtgttaaaagataagctattggctggctgtggagcaagggtggctggtttaagcactgtcctaatctgtgtacagtggatggatcttgcccagggctccaacccctcctaattgcttagcatcttcctgaagccaagatttggggggggggcatcattgagcacttcaggctgctggctggccacatgaggactgaagtcctcgcacccttgtctttactcttcctgcttctgacagttgtatgtcccccatctcaccatcttctttgagtttttgagagagggactttcccaaaactccctatatatccaaggatgacctatacttctgctctttccagggactgaactcaagacttcatccacgttaggagagccaactctacccactgagctataactccagtctcctttttggtcatgtgaggcaaagtctgattctgtaactcaggctgaccttgaacttaacatgcctcctgcttgagcctcccaggtggcaccgtgcagggtttctgccttgcttttgggtgctaggtgccaagcacaggctggtcaccagaggtcgtgggacagttgtccttccacagtagaatgtactcagagctcagtgctccaggatctcttatcttatctcccaggcctcactccaggtgcctgtcaccactggtggaggagataagacagcctggtccaactggggagtgaacccctttgctgtcctattgggggtctgggtatgcaggtctggccctgggcgtgctgaggctggccctcctgttcagtggtgattttagtgtcctctctgttctcagtggccactgagatttattgatcgccgtgaccccattctggatgacctgggtgcttggttggttaatgtttgaatgactagggaccagctttgtgtgacttcagattttttactttagtccaaatgttttctggtttcaccaaggccagctcaggggccttgcagggattccgttctccctgtctttctcccatgtgagaattttaaggaaagaggacagataggggctctctctctctctctctctccctctccctcttcctctcccttcctctctctctctctctctctctctctctctctctctctctctctctccctctccctctccctctccctctccctctccctctccctctccctctctctctctctcttcctctctctctctctctctctctgtgtgtgtgtgtgtgtgtgtgtgtaggatctgaattccaaagaccctataagataggtgtggtggggggagtggagacaggagaatgcttaagctctctagctttggagacctcgtctccaaattaaggtagatagccagcaagatggctcagcaggtataggcacaacctgagtccaatctctagaaccaacacagcagagagaacagctcctgcaagttgccctctgacctctgcatccgtgccatcgtgcaggtgcacatgttatccacggtaacagaataaatggaggccggagagtggtggtgcacacctttagtgtcagcactcaaaagggaggcagaggcaggcagagctctgcgaggtcagcctggcctacataatgggttctaggacaaccagagctgcatagtaagattcctaatctctcaataaaaggaatcttaaaaaattaaggagccaggcagtggttgcacacgcctttaggcccaacacttgggaggcagaggcagaggcagaggcagaggcaggaggatttctgagttccatgacagcctggtctacagagtgagttttaggacagccagggctacacagagaaaccctatcttgaaaacccaaaatataaataaataaataagtcgagagtgattgcagaaggccttggtgttgacctctggcttccatagtttatgtgcacacatgcccaagtgcacacacatggacaattacatacataagtacagaagagacaaagtagtgtttcttgggtgactttcgcaggttctttccaagggcaaaggactggactgaggacccccccatgggagccaaaggtttggggtacaggagcaggtcttctttgcagcactgagctggagaggtgcctcctactgcagcagcgggtaggatgtttgttgtgggttctgagacactgacgtctgtacagcggtccggtccgttgactgggagtgagccctgtttctggtggttggcggtggaggaatggcggagagggatgccggtagccactggggagcagaggactttgcatcctggcacagaggagctctgtgactagtttatacccaccggctctgaataagtatttgctcttccatcactgctgctgggttgagtggagccaccagaagctgacctggtaaccagtgactgtaaacttggtggttgatggctgaggtctctgtaggggtgcctgagccttttctggtgtgtgtgtgtgtgtgtgtgtgtgtgtgtgtgtgtgcatatttgaggggatatgcacagatgtatatggaggccagaggtcaaccttggggctacctctttgtattttgacatagggtctcattgctatacccagagcttacccattcaaccaggctggctggccaggagcgagactccacctgcctcctccctggtgctgggattaggctgggattactagtgtcacacacctgtcctttgctgtagattctgaaggatccaactctatcatcatgatggtgcagcaagcctttggcctagtgagccaactccccagccccagcgcctcctccttctgagaggagaagtccagcttaatgtacacacttgcttagaggatagctgcagatgagatccccgcagtgagccaccctgggcggagccaaagccctctgcaaccagagggactgattgcgagtctccacctccatgtgggaaggttggccaggctccctggggcccagtgaacctccgtggcatgtatttaggagggtgttacttcctcctcttggtgacttctggagcctggccaatgcaggagggtagaggctgatctctgggagttggaccgttggctgtcagttcagctgcttgtgtaccaagtcccctcagacaatggaagaatcgtgacgttctccactgtgtagtcttcatccagctttaatgggtgccccttgactcttataccttagcaccctaaggatgctgaggactcctgagggcaggcaatagggtggctcagctcccagagagtggagcatcctgtgtaaagcctggaacctttgtagaagtagggttagcttaagatggaaggcttaagttaagaaagggtgcctgctttggctgtgactaaggcctgtttagaagatgaggtggaacatcgaggaaagagcagacggttaaacatactgcagggcggttgggagacccactgtgctcattcatgatgggagacctattatgggtcaggttgggagacctactgtgctcatgatgagagacccaatgtgggtcaggatgggagacctactgtgctcaggatgggagacctactgtgctcaggatgggaggcccactgtgggtcaggagaccaaggtcaaagttctggtctgcctttgctattggacatgcagctggcatattgtgagcttctggcatcttgctggctttgagactaactcactgcaagcttttaacactgaagcacttcatgcctgtaaccctaatacttgtgaggtagaggcaggaaagacatgagtttgaggctggcccgggctacatagtaagatctagtcccaatgtgctcccccaaggatatatgtgatgtcaggacacagacatttagggaagtggacctccaggttctaccttgggctatagctctgtggggttttcctggggcgagatgaagatggtcccacccatctgcacaggatttggagagtagaggtctgagtgtcctgggctgcggctgctgtcgagagccaagcattgaagataggtcttccagaagtttctgaatcttgggtaatatgtcccagagcttaaagtagaggcaatgcctggggccctaagatttcaacagtacttgagccaaggtagctctggtttgaggcaggagggagggaccgctcaggatttggcagtgtggacgtgttcaggggacaggggagaacttgggaagtgtgggtccctggatcatggagatgttacaagtaaggaagggtcaggggtgtcccccacacccatgtgccgccctcacactacccaccctcagacattgcctgcttcctgctcgcctggcaacagtcaggctgttcccaggccgacgcttagctgttcctttccaggtgttgtggccaccttcccaggcccctccatggttagctgtggacactcacacacacacacaccgccgtgtgcatctcctgtccagtcctgaggctgccctgggggccacagcgacatcctccttccactgacccacagatgcacttcacagtacccttgaagcatctgtccacacataggatgtgccatcgtgattgtgacccagccttggtctgggagaactgtgcagcccccagccaggcccacccactgcctttttttttttcaaaaggaggggcatagatgacctcactgtgggcttcagcatctccatctgtctaagtcagcagagatctctctcgtcctagttcacaggagctgcccctgagaggcttggaggtttgggagtggatagtgcaggaagttgcaggtgcccccagtgtgtcagcccctttgtccatccagaggtcttcctccctttggggctgtgtggccctaacaggtgggctttaccccagtcctgtgtgaaggaggttgtgacttcctgggaacgttcagcacccaggtttgagggcccagcagcccctgcatttggcttgctcagatctcgatacaggtggccgcaggactgagaatagagcaaagaggactctacacgtgaggggcacgggaggaaaacagcaggcacaggatctgcacccaggtcctggcctctggcttcgggattcccttgccagtccaggcccgggaaggcaccagaaagcagaagcaggaagctgcatgctcttgtcttccttgccggtaattggtgggcctgagggactatgaattggattcctgatacacaaacggtcaggagagtagccacaggctcacaatgaggctagccccttccggtctcttcctcacactggaggcacttcttgcctcttaattctttaacggacaactaacctgatcaagatgcctaaatggggtgcggtgaggtggggatagacaccgtcccctgcaaccgccaatcctacaggcctaagcccggagagacaagcttccgaagggacgtggaatgtatgcaggcgagcatggtgcccccggggccacagtttatggagaacatttctggactgttctgttaccccaccaccaccacacaaattaaaccaaaaattaaatgttagccaccaatgctttaagcaactgcaggaaatgtggagtcttcttccctgcactgcccccatccctctgtgactgtatcctagcactgtgtctactctttagggacagccggccagccaacttggaagccctattgggcacagcttccagaagtttgccagcccccccccccctttgtccccttgtccttgggagaaattaccatatgaatgtcgttccttcccagcgcctgggttggagaggccctgggagaagactggctcccaggctgccgttccggtgttggctgaggaccatccacggcatgccagttttcctggacatcggttgtctacatcccataatagatctagctcagtcctgggtttgagaagaggtggaagaagaggctgcaggtgtagggatctcagctgggaggaggctgtgggacccccagccacttgggaccccgcccttgtacctcctcattaacctgtcctgagaaacgtgttattctgggccttcttgcgatgttgctaattactggaggaatccagcgggcgcgagggtatggggcagtgcagttactgtgaatgaatggcttgtggactgtagagagtttggcctgtcgatgttctagcagctctgatggtctggcttgagtcaggcctcactcaggtcgggagtttccattgagttcctggttgcatctcagacactaggttcactttgcaacctgtgtgagtcacgctggtgtttgggccaccaaaacatgctgtcttgtatccccccacccacccactctggctacaaaatattgaaagtatctcaggagatgccacctggcagtggagtttcttctagacagcatttagagatggtagcaagacccagtccttgacatgggccgtaataagcggtctgaatggaacagaagtgacatcgccagtggaggcccaggtgagggccctgtcctccgtatctatatctgcccctcgctctgctctgtttgctcagtctgagcctggcattaggacaagatggaaaaaagataggactgaagcccaggcaaggccagcctggcccctagttgcatttgacgcctgacctcagtggaccctgatctgagtatcctgggaaagtccttccttctgtccccttcctcagctctacatggcttctataggtgacaatatccagaaattgttaaagtcacatttgggtgccgggacagagattcatcatgcacacacacacacacaccccgtaccgaagaaagggaatcggggagtacctccaggcccccattgagttatccagccaggttcacagtgacctcagatgttagaggccctgctggcatgaagagtcacggggtgcacttactatagcctgtgcaacttgctaaaacagggaagcccaccagcatagattagctgtcctgggaagaccgaggagcagggcagagtacagcagcagggaaagaatgttctagacaggctgactctttttttttttttttttttttttttttttttttttttttagacagggtttctctgtgtagccctggctatcctggaactcactctgtagaccaggctggcctcgaactcagaaatccgcctgcctctgcctcccaagtgctgggattaaaggcttgtgccaccactgccgggctagacaggctgactcttaagagccttttctgaagagctgagaggagtttggaaggcgttcatatgtcggagagtgaaggggtggcatgtgcatttggctaacagcagctgcatgcaccatgttctgtgtctgtcaccctccaccttcacaatggtcttaggggacaaggattatctttgtgtgcacagtgtcgtacagctcagatatttgctcaatcccactgttccatggtacgtcagaggtgggagaaggtaaaggggcccaattccgtgtcaccctgggtgctggggacaccggccattgatttgaagcaaagacaaggtaggactaggatatgtgtcaaaactgtccttccagggctggggagatggctctgagtaaaacgcgacccaagtttggtttctggaacccaggtaaaatctgggtgcaggcatgtgggtacctgtggcattagtgtaccgccaatgggagatagagggataactaacagcatacacagccttgaataagacaccctaactggatttgtggtgataaaacagaggggggaccattgtggtatagctggagacagcattcccaatagtgggggcaggggcagggtacccagagttcatttacacttccagacagttcttgcatatatagacttggacaacagtagctatagataccaaacacttagtgcaggacctggtatatggagtcttgatacatgcctgttgaactgtgatgagcatttgtctatctgtcacctctccatccgttcatccatctacccacttgtctgtccatccattcacctgtctgaccatccatctacccacctgtccgtctgtctgtcccatccatccatctattcatccatctatccgtccatctacccgtgtctgtccatctacccattcgtccatccacccatccatccatccatccatccaaccacccatctgtctatccacctatccatccatccgttgtccatttgtcagtctgcctgcccacccatccttactctctgttcaggcagcattacatgacactgcttggtcattcatttcaacagtgcgtcataggctgccctgaggcatttgctctacttggttggttgcttctccttagagaactaggtcatggtgtgaggatctttcaacatacactggtgccgagggattcgtgttccctggtggatggctagaattcttgggtttcaggatctccccaggacagggatctgtagctgcaagagtgagtggctcatctcagttcttctgcctgtccttgttggactccataatacagtcacaggtttcttcttccttaaggtcctgtggtcacgccctcttgcaccagccaggaccagcttctctctacctggcccttaagaccctgccttcagtctcgtcctgtcccatgtcatgccctgacccccacccccaccacaacaaagtgaatggggcacccggaagcctttggcagtatcagctgacctaggcagaaaagatctgtatctctggggtcaggcctttgtccacgggatttctggcggcagggggtaggagggtagaggggtagggcggggtgtctactttttgttatttcaaatgatttcataagttgggggaacctttgaccatgtttcacccaccccaagctctggtgtatgtcagcagctgacagcagctgataggacaggggtcaagggattgggaagcagctctgtcgcctccccccccttaggggacatccctgataagaggaaattcttgtaataaatggccagtgtccacagtggggtgatggagtggcctctctcccacccccttctttctccatagacatttgtcaagagcaaagggaatctgtggcccagcagcctcgatggcccctgctgcagtaggacatgccagtggcgtcctgggtagggctggatcttcaggtgcagctgttgctgttggagattcctgggggtgggcagagtcagggctgccttccccgatgctgctatgtaatagatgaccccaaggatgggcccaagcagggtggtcagtggaccccggaaccggaaccgtatttaaatccctgacccagaactttggagggctctgcagaggccttagtgtgctgttggaaatctgctgtggcttttgaggaaatgaatgagaagggcttgcaggttgcagcctgccctgagcaaaggttgatgtctcaataggcccagcctagtgagaaactgctagctgtaaatgaagaacagaaggggtctcctcgaggggggtggggcgcccctggacttggtccaagtttgcctctgtggattggggccaattgaaaccacgttggcagaagtacagggctccttgagagtcctccctacaatagaggggaggttgggtgagggaagcttggcaaacagccaaagcagggaccctactcccttctttgggatgcctagggcccctgcctctgcacacctccccaccctgccctcatcgaaggaaaggaggagtggatgggatgaagtctcaaacttctctgtccgtcccaggcccttatcggacgcaaggtcacaagcatctcccagcagagagcagcttgcggaaaccacatcagggcagtgttaagtcccctcttggaacttggactggggaaggcactccagctgggagaggtgggaagcgctccctttgcaaatccctctctactgaggccaaagccaaggccaagcctttgtgttgggtttccaagtgggggtccgggggcggtgcaggaggagtctcagatttctggcatccatgcttttaaccagactccaaggagacacttcctgccccaaacaaagtgtgaagtgtaattcgatttgacttacttatcaaattagatgagccatgtgcacttttaaaaagttcggcttttgaaaccgggcacatgaatttgcaagatttgatcatttatatgcagtttccatctttggaacaggacagggagcctcttgtgacatttatggggagcgcagggtcctccggtgagtcagcaggggccagggcactgtgaaggcagggtgaagaagatgggggaagtcccagctccccagaaagcagccttccacatctctgcccacccatgtgctgacaacctgggtcgagccgcccagggagtcagctgctagagccttgacccctctaacgtgggctcctcagacttatgtcccatgctccttgactctgtatccctcctgcatttgtccatctctccagccacagaagctgctgatctagatcatctgtgtggtgtgtgtgtgtgtgtgtgtgtgtgtgtgtgtgtccatacgtgtgtgtgcgcagatgtacaagcaggtggaaaccagaggaatatgctgaccttcgtcaatcacctttttttgtgtgacagggtctctcactgaaggtctgtcagttcagcttctggaatgcctctctgtttccacagcctccagctctggcacatagagtcatcattggctcttacaggagtactggggatttgaactcgggtcctcagtaattccataacaagtgtttttatccactgagccattctcccagcctcaagtcctcacttttttgtggcgtaacattcctgtatcggggagtctgtgggggtttgtcgtggctccatttaaaatcttactctgtaaagcttcctccgtgcacctgcctgagcctgccctttcacccactggtcagtttcttagcacagtgtatctgctgactgaccttgttgtggatctgatctctgaggacataggaatctgccgccattactgtcgctctctctccagggcgagtcctgctcctctggcccccagctctgcacgggccagcttcccacatggctatcttactttattttatttttttcctcacctttatttccccagtgggctcattaggctcctctctgcccactcctgcctacctggtgcagagaatcacctctgagcctttgtgagtccccctgtctcctcgcggggcctcctggaggggagtttttatactacacggacactgatgtctgtcccaggtgtggctccaatggagagttctagtctggcctccttgttctaatgtgtggcctctcatgtgccaggagcgccctggagtcagccctacttgaggctcagtagctggtggtaaagaacatatccaccctttgcccttggggtgggtttttttttccaaactttactgaattaaagtgatactaccccaggaaacctgggaagggccaataacctgtccagctagctgggtgggagaccccgacaatcctgggccctgccttcagactctgggggtttaagttcaaggccccaacacagggccccctactctggaggcagtaccttccgaatgatgagggtgtggtgcattttgggatgctcatcttaccgcagatccagggctgatcttgtcacactggctgtagcctgggtgccagttccctggctgtccttggcaagcctgttagcctgagccttctttctcatggccagttgggtcaaggtcagccttggtctcatcctctctgggagcccctcctaaattgtggcctacggccctgtcccagtaaatgtgaagggtgatataatcttgtcatctttggcaggccctggggtggggggagaatgtgttacacagtgagtaagtctgcagatggtggtggttggacccaccacccactggagaatagctgggatttacagcgggtgtctggggcaggaacgggatggggtagatgggcctgcacacacagtaggacccacggtctaccaaaagtagctttagctacttaccacccctcagaaactcctctggctgggagatgactggctggctggctacttgctcagagcattgtgtgccccgttagcatccgcagaatctcagcttgagaatctcagcttgagtgtcagtgtctggggctcaggcatcctgagctgcacactggcaggtggcctggccggcctctctgtccaactaggctataaacagctgcccggtgtgccccccacccctcgcatcagccatgaagagtggtctccagccgtgtttattcatgatgtcatgtaaccattgctcctgtctaattcggtgcattttatcaccctggagggaaacgtcatgctggataaagagtttcttctcctcctactgcctctgtggatctgccttttccgagtgttacatagtgtcagtcacaccccggagtccctgtttctttagctcagtatgtatttcaaggttcatttgttgtctgccatatccgtaatctttccttcttatgggagagctgtgttccctcagattcacttgctacacttattaatgcagctgtgaacaacttagcgctctctctctctctctctctctctctctctctctctctgtgtgtgtgtgtgtgtgtgtgtgtgtgtgtgtgtgtgtgtgtctgtatgtgcatgtacctactccacagcactggtgtggaggtcacgggatgacttgggagtgtctgttctctagtcccagagacaacgctctcatgactggcaggcgtttccagccttgctggtggttagctttctcgagtagtcatttctgcttcttgctgggctaggactcaaggatgcccctgagcaggctgcagccttgggtggctgaggagggagggtgtcagggaacacactcctgaccagtaggcaggtgtcagagcacagaactcatgtccaagacctagtgttccaggagtgagcagtccagaaaaggtcttgcctctgctcatgtgaccatccagtggcatttcaggaaagagtcagcgtgtagacctcatgtcccctctgtaaagtgggagtgccaggctgcctgatacacgtgtcaggctcacgtaggtatctaagactgagatgagctaaaatggattcttaccgtgcatctttgctgaattagctcgggagtcacaggcagatgcacttggctggttcctcagaaataaaaatagaacggctcacatctggatgtatgtcccaaaccatcgaaagaatgctcttgctaggcatggttggtgtatgcctgtaatcccagtactcagagggctgaggcagggggatcattgagtctgaagctagactgtatataagagagagcctcagggaaggggggagagagggagagctagcctaagctctcaagattagctctaagggtgttaattattctgtatgaaataaggcaaaagccagagatcatctaaccccatggtggattctgggaaggcctgtggtcgctcctggagctccaggtctgggatcccaggcaactctgggtggaggggtctacctcctaaccgggcaggcaggtggatggggaggccctcccaggaggaagggtcacaggggtaggccagagatgtccagagcccctggagagcatggggctctactgtgttcttattatttctcaagcaggccctctggcaggctggatgtttagcttggtttgggcttctgctgtgaaccttaatacatggagaagggccacctggggcccgaggtgtgccttccttgactgggggcgattagggagagttgggggacagccacacctcctttcactgttgagcagagaggtagggggagggcaaagtgagtctcagactcataaacagatggaagcaattttcagtcatgtgcgcaaggcctgaacccctgcacggcaaggcagggccccgtgtcgttctccaggaagcgggccccaaagccacaggttctagggccagatgttacaaggtctttgtttatttaaagatgcccgaaacacaggagagtatttctgagtggagagctgacagacactcttgaagccttgtggaggggactgacctgggttggggatgctcctgatggcaggcactgtcccttaggactgtctgtgtcattgtttgggggcgtctggaccccgtggcagctcctgctgtgtttacaagcattctcttgttcaattgcctcccctctcccaccacccctctcccgccacatgccagaagtagagttgcctgcaccctgtggaggccgaggaacaggaagttactgaccagtaaactagatgcctgtgggggtggtccccacatctccttcctgaagctagctttgcaagccatttctcctgtcctttctgccactcaagccttgagaagatgctgagaggaagtgtgtccggctttgctcccgctggacatgctagtaaaacggagagaaaagctgccaggccagagatggtcagggttgagcgagctgaggacgtctgggacgagtcagcttgagtttagtggtttccccggacgtggagagacagtttaaccaaagcctgaaaaagcccctatgctacagacccatcattttgctgcttcctggcccctgctcacttggaatggtgccccccccccccagcacctttggtcggttcccttcctctctgagggaggagaaggcacaagtattcattgagcctctttgaggttagcgtgcgtgggaacagacataaggaaaggaaactgggaagcaactggtgacccctctgtcctggctgtgtttggggggctgggctgtggggtcataagttgagactgctgacattttccatagaggctgaaagaggtgcctctctagggcttatcagcaatgcatcagctctacctcgaccaccccacagcggcctgggtttcagagccgcactggcaggctatctcagaataacagttaggtatactgtaagcattttgttcaaccagaccgggtggaaccagccttgcacacccctgcagggtgtgagcacctacggtctccatctgaatcatcccccaggcttgggctctgaccatgcatgcactcagccacaggaggctctaaccctgacctactgaaggaagctgaagtcttcaagtttaacccctagcctgtccacagacctacaaaccaaatctggcctttgcgtgagggtgagggcacttgctgtcggccgtagcctgtttcctgcctatcctgcctggggactgtatgggtgggccacctgggagaagagacacccccagtgaggatgagtcaggtctggaagaggcaggtagaaatcagatcacccctcccctgggaactgcctgtggtcacctgttggaccgtgaagggccctgagtgctagctacagttactgtaagctctgagcagaggcgaagggcgtgtgccttcaaccctcaggacttggggccaacagaatatggaacaaagtccttgctgcccacctggaaccaggggagccctggttggcagagctggcagagacctgaggcagatggctgagtggtgtggaccagttgaatgctactgtaggggatttcagttctgagatgctatgcaggagtttcatgggcaagtcaccgacccctgcagccttggtttcccatctgagtgccatgctggctgcagatcccattctcacgtctctgtttctccctccccagactccgaggtgactcccagctgtgttggcgacatggctgacaaccctagagatgccatgctcaagcaggcccccgcgtcacggaacgaaaaggcccccatggagttcggctatgtggggatcgactccatcctggagcagatgcgcaggaaggctatgaaacagggcttcgagtttaacatcatggtggttggtgagtgttacaggccattcggggggctagcctcagccccagctgagatcttgcctccctttgcctcccgagttctgggattaagagtgccaccatatctggcctatcagctctccagggtagtgtctgggcaaatgtgtgccataggctgaggtcctaaaccaatagagtcagataggcttccgactgcagggcctctgtctggtgaattgtcaggatgtctgttctgcccagatcttcacacagcctacacatctcttaggggctgttgcagctacctaggcccacacctctggagtcttggtgtcccttcttgctttgggtggccttcctaggaccaggaaggagctctgctgagttaaaccaggccccaaatccccacattggggtttaaacccaaccctggacttccactgaggaggtgaagcctcaggcagggctatccaaggatgtcctggtcatagtgtgatgtagccatgaactgtgttcttggagagccttccaaccggccttcccttctctccccagggcagagcggcctcgggaagtccactttaatcaataccctcttcaagtccaaaatcagccggaagtcggtgcagcccacctcggaggaacgcatccccaagacgatcgaaatcaagtcgatcacccacggtcagcaccacggaggctgggtgtagggactgcgtcttcccagggtgtggggtcagagcatagcactagagaggtcacgtgaccccgtgggaaaattgggactgagtaatagtgggctggattcccatgggcccaccaggctgagctcccacagacatctgaggtttctttatactaagagtcatggctggcaccacccagaagaggtcacttgctccttggcatggcctcagctgttatcacagccctttctgggacgtaccaggctggccaggcaacctgaaggcttggggtgacccgcctgacttggggtgctatggtttgtgcagatattgaagagaagggggttcgaatgaagctgacagtgattgacacgccgggcttcggagaccacatcaacaatgagaactggtaggtcactgagagaaccttcctctatcagtaaaagccccactggtcttggggctccatgataccactggaggccagacccccctgccataagattatttcaaactctaaagccgtgcatttggggtctaacattctagatcaaaatggggtcacccggctcccatctggggtgggtttcccaccccagggcaaagatcagcatggggagtatggcagaaaatctgaaataaggctggtttgtctttgcaaccaccagcattcctgtatgaaatcagaggctggtgtcaagccagttctgggaattagcctgttataggggcctgggagggcgggcttagagaggacgcgggcaggagggagcattcagggtgcaggctaacccggctctccatgcagctggcagcccattatgaagttcatcaatgaccaatatgagaagtacctgcaggaggaagtcaacatcaaccggaagaagcgcattcccgacacccgtgtccactgctgcctctacttcatcccagccaccggccactcgtatgtcccatgctgggccctttgtcttgatggtgggaatccccagttcccatacaagcaggattctgtctgggcacagggacaggggcactgagtcagagctgtgtcagcaactgtcatggggcgtctgtgcctacagaagttctccatgacctctagactgggcggttccacgcccactctgccttcttccctttgtgcacagagctgaggacagggcagactctggggtgttctagaatccggtagtcagtctctgcagatggaatgagactctcgggctgtacatgtgcctgcccccatttcccgtccttgacaaagatgcttttagggcctgggaggcttcggaattccaggtgcctttcagaatctccctttggaatctcccggggcagctagactgtcagtggtctcagtgatcagggttcttggcttcctgtgagtctcatctgttcccagtacatccgtgttgttcctctccttgctggatatcctggtcgcttgtcctgactccgtgtagggtgcatgtctagtcctgggctcagagcagcaggagccggaggtggctcgtttagaagagttgaggagtcacagatttggtgctgctagagtgtgcacactcccggctgttcctggctcatccctgggtgtaagagcgtgggctttgaagggacttttcatcttgcaccctgtctagagggcaaaagtctcactggggtctggttggaaaaacccaaatatcgttgtctgagcttgccagtagtggctgtctccagtggggtccacaagagccagttctgggaattagcctgttataggggcctgggagggcgggcttagagaggacgcgggcagaagggagcattcagggtgcaggctaacccggcatgccattggcctcagctggggctggcttgtttggggttctgtagctgctccgagcacagcctcgggcaaggccaaggctgacagaggagacatggctgacatggcttcagcagggagagccagaggcagacacttccccagtggtgaccctctggactagggcccttcctccagccgctcagtcccaggggacagtagtggcttctggccatcattgcttggcttctgactgaagcttcacttcctgcaggctgtctgggcctgaagatactgctatggggaagatgccattccaatgagaaaatggtgcccaggcttggggtctgccagcctctgccccatccctggatcagaccctgggtctctgcagccaggctgacctgggaacagccagcctgtcccagggcctggagcttctggataccgtccctcgtgtctccttttccctggcattgaaaaccccacggcatgacagtgttgtgagccgagtcactctctgggtggacggtgtccagggccagttggactctgaagatcttgtggatgagggagcttaaagccagctttacaccagctccccaccctcagctccatgaggggagagtgctcaccctactaaggcccaaccttacccctccatcaacatggcccccactgggacccctaaacaaagtcttttgcactgttctgtttcaggctcaggcccctggacattgaattcatgaagcgcctaagcaaagtggtgaacattgtcccagtcatcgccaaggctgacacgctgaccctggaggagagggtctacttcaaacagcgggtaggactcatggcctctacccagccccttcccctccaggactgcccagacaagtgacaggcttgacaggggcctgtccagccctgggatatatgataggaaaggcgcctattcagctcttcacagcatgtgttcagccttgggggagcccctggcctttgtggatgtggggctccccatatccagccgtctcagtggggttcagaagggagtagatcaagcagatgcaaatgtgtcagggccattggacccagcattcctgagttttattaagtgggacagtccacctcagtggcttcctccttctctgccatggtcagggccactgctgtctgggtgatagggctgtacctgcaggcgtctgcagtagggtaagccctgggcctcttctgtgtgaggtgactttggagcctcttgagagctccagcctggggttgtaagagaggcctcaaatccaattgcagaggctaccagggcttccttccctagctgtgtgttggggattttcccagcatgcataggggagggtagtcagggatgcatctgctggagaagagaccaggatgctccccggtgttttgagagcctggatctgcttgaacagataagacagtcagctattccctgggccaccctatattgacagccacgtgggctgtcagtaagtcgtcaagctggggagagtttcagcaggcaggtacaccctgggctaccatgctcatcctgagagggttttcggaaagagggcgcagcaagcctgagttgttttctaggggggagtggaggggggagctgcacagaaagcgcagggagactcaggacaatggctgcagggcccctcgggacaggcgagtgcttcttgatgcctaaggcttcagagctggtgatcctcggcgggggtggaactcaggcggtagagtgctctcctaccatcgagagggctcagggtttgatctcagcaccacatggaactgagcatgataactgtcgcctcccaggattaggaggtagaggcaggaggttcacaagtttgaggtcattcttgtttatgtagccagtttggggctagcctgagctacagactttgtttccaaaacgtggtggcagtggggctggaaagacggctcaggggttaagagcactcaggttcaattcgcagcacccacgtggcagctcacaaccagctccaagagaactcagtgtgccctcttctggcctccatgggcacttagcatacatgtggtacacatgcaggtgacacacttgtatatataaagtaaatgtaaaatgaatctttaaataaattagacatcctcagggtgggcccactcagagcctgcctttgttaggggatcatggctcaggcacctgagtggctgatagcctgattcaccctgtatctcccagatcactgcagacctgctgtccaacggcattgacgtgtacccgcagaaggagtttgatgaggacgcagaagaccggctggtgaacgaaaagttccgggtcagtgggtcaatctgcctctgggaggtcaggggcggtggacagatagacgggaggcagtctgtccactctgggtcctctgaaggcaaggcctgcagttttccaggcccaagacacagggtgttcgagggtggcactggccctgccgatcactgtgactaactcttccgtccctctttcaggagatgatcccatttgctgtggtgggcagcgaccatgagtatcaagtcaatggcaagaggattctgggaaggaagaccaagtggggcactatcgaaggtattggctgctatgctgctgcagtgttgaagctgtagttgggcctgggccgtcacccattgcgctgtgggtccctgtctcttgtaaggacactggctgtagtgtgcacctcatgtacaccagggtccctgaatttaatgactttgccagacttttgttactttgtcccacgcactgagggctggggctctgaactttcctggggtccagcaccccaggtgggatgggtccagggattttcttggctcttctctctactcttccaccctctttggaacggaggatggggaagggcagagctgcctggaagatgaaaacccactttgttccttgtgaccagtgtggtcaaaaggccccacagagaagcagagagttgaggctttgatttgggggaaatcccagttctctagggccccagtcttgcacccttcataggtgcaggctagacctctgtcctaaggtctaggcaaaacaggatggagcccaggatgacctggtactcaagtcctcctgcttggcctccggagcactgggatcataggtgccacaccccagctgctggaactctccgaggagcagtttactctaaggctctggtctggttggtgcttcctggctctgggcatagaggcctccagccaggaccaccctccccatagtggattaccatttaaccctttcagttccccaggtccctcccgctcatccttgtccagtgccaactcaaccttcctttaacacagttcctcatgctgtggtgacctccaaccataaaattattctcgttgctacttcataactgtaagtttgcaactgttacaaatcgtgaacatctgacactagcaggatgcctggggttgtaagtttgcaactgttacaaatcgtaaacatctgacacgcaggatgcttggggttgtgacccgtaggtggagaaccactgagtcactgggctagtaaccattggtcaggtgcttgccttgaattaaatgagttccacactctgccccccagaaaccaggtttgctgtttctgtgctgtttctgcgggatctatgatcttagtctttgagatgtggagccaggagggtcagggactccttcattttcacccaccctacagtgagctcggagccagcctgggctcccggagacactgtctaagaagaaagagcaagggagggaaagcagagtaagaaaacagaatgaatggacagccagggctccatactgggaggtggtctggcatgccacgtgaagccttgcactggagaccctggagttggaattgttgcctggtctttctgaggtgaccgctgaagagggcctgtcttccagcccctcccttcccctactgtgccctcctgtgggtctgccaggtggggtgtcctggggacagtctctgggtggttttggtgcccgtggcctcctgtagcactcccctcaatgtcaggtgttgaccccagaagtgactctaggggcctctctgaagctgttctctcaatagcttgtcctcagcttggttcccctcagtcgttccttcccatctttgatgtcttcctcatcctctaaatcctctccaggaatatgcaaggcaaggtttggaggagtaaagtttggggtaaaagccctgggactctaggagaggcattggatactaacgtgtctcttctggcccctgatggccaacttgggtactgcatgcactcaatgagaactcatttagccaggttagattactgttcccagctaaggatccaggcagcctctgggtacgccccctggtggtcgttcccacatccagcatccttgtaaagtgaacctggtgcaagttcctatcagggaccctgtgagttcataacttactaagtcccatccaatggggcctactcctaatccttggtacgcaccatctgaagtgtctgttccatccttggaaggtggccagagtactacctggaggatggaaagctacttggttcctcaaaagcgtcacaaagtcagaatacatccttggctcatttggtcttttgtgcccttaaggtccaagccatgctgatctcccgtttaaatttctcttacatttatttattaacttatttactttattggagggagagggcacgcacatgccaaaacacggatgtagtagtaagacgacagcttgcaagagttggctctcaccttctactgtgtggttctgggaatcaaactgcagtcattgggtttggcggcaaatgcccttatctactgagtcatttgctcattttattgagaaactgggtcagagaagccaacagaactcaccccagtccagaacacaaggaatgaggggtttatttgggctcacggttccagggtgcagtccatcatgctggggtgtcatggcggcacgacaatagactgttgatcgctgtgtatccgcagtcaggaagcagataaataaatgctggaattcagttcactttcttttttattcaactgggaaaactcggcccacaggatagtgctgcccacattccctgtgggtcttccctcagctgagcctctcatagacacactagaggcgagtctccctgttgactccgaaaccatcgagtggctgtcaatcatcctgcccagtgggcggggctttctggaagctgttggctttcccggggaggagaggaggggcttcctccccactgatcatctctccttctcttttccttagttgagaataccactcactgtgaatttgcttacctgcgggatctccttatcaggtgagtcagctctgaaggccccttgggaggaccggctctgggggttggtggtggtagatgggcgggaaaggccccaccctggccgcctgatgtcagccctgttctcgggaactgagctgaaaacaagctaacagaaacctgggaatggatgaagaaatgaggattctttctaacctttcgaagtcaccaggatgagaggggctccatccggtccccagtgggctaaacatgctagattcagctatggctactgtccacacagcacagcctggactatatgtcccaaacaaaactaacaaactaaaagaaaaaattcatttgtgtgattaatatacattagtagaaaaagtcctgccaggcaggactgtctgagggcctggggtggggattccaggaataaagccttccgggctcctcacctttcccactccccttcccaaagtaaagaggaggggaggtctgcagtgtgggccatagatagaagttgcctggcaggctttaaggctctggctcccacctgcaaaaagaaactttgtttaaaaagtcagtttaggaatgtcagggtaggcagcgctggggactgtggtcatctgctgcctcctgctggccacagcatgaatttctgtcttggagcacgaatacccaagtcctgctcactggtgaagaaggccttgagaccttccacagctttgtgtttttagtgcccagttctccatccttgtgcaggcccctgactagccaatgtgaacacagagacgggggtacgggttagaatgtgaggccacagaaggtctaaagttaccagagagcgagtgaacgccacctggttttgctgggtatgcacagagagcctgcaggatggctctaagagccaggaggggcaggcggttgtcatcccaggcaggctaagtggtcaccccctcccccccaatgctggccatgttccctgcaggacgcacatgcaaaacatcaaagacatcaccagcaacatccacttcgaagcctaccgagtgaaacgcctcaacgagggcaacagcgccatggccaacgggatcgagaaggagccggaagcccaggagatgtagatgcgtcccgcccctggaccccacccccagatcttttcatcatccctggcccacccacctaccctgtcttattttatataattatctccttgtcacctgcctccatccatctcttcccacactttgccaggtaacaagagagggtttacctcccaagtgtgctcttattggctgcagcagcagggtgggcggggctaagcctgggcttgcctctgtgctctatttccacccgggctcagcccctgaggggttagaagagctatgtgtccgtcccccgctctgagttctaagctgaagcctgtgggggccaagtcctagggggtgcagaggagcccgttagaccacaagaccccatggccgcagcctcaagcaggttagagactgccccaaaggaggatggagctggccgggtattcctgaaacctcacctgcccctccgggggcgtttcttacagcgccctcagctgcctgcccctcaagggaactagaggcgtcacagccaaagttgccaatcacttagacaaagtgacaaccgtgcccctcgagcttgtcccagagcagaaagtgccttgatctacaagagccagtcacctcttcccagatgtccctttgggtgaaaagcagggacgtgctggagagagggaggtatcttttctccctcgcccttgggttctctctcccctgtgctgtagatatcgctactacactgggctttaattataaaagacgaagcgtgaaagatgctccccgatgttaggaagccccgcccccaatgtaaggaaggtcaaagcaagaagatgagtcgaagccatgagggaggaagccgtggaagggaggcataagagtgtgtgggagctctcctgcccaggtgccgcggaaggcatatccgcgtggtcctcagtttgggccaagatattctggttacattgatgctccgctgcctcaccctgtcccaccccacacaccccaggctcaagccttgatgattcagtgactgtactgggtgggagccagaaacctgaccattttgttgtctacatgagcctagactagccctgtgccccagaacccatcaaaaatacccctaaagagggaaagatgagggggtcagagatggatagccaggctcactcatcttctctcagagggaacattagggaccatccatgcacagctgaccaaagccgtgtccttcctgcctgcctcccattctcatttgcccctgaggagaaagtttggtgaggtgcgttaggttggacccgcttggggaaggtgcctctacagacccagggctagctttctgcagcccagaagtgcagtgggaggggtggggtgcagacagatggagacgaacattgtttcctgctttgggcgtctactccctcatccaagcatggaagggcccctcgtcatgccctgtggccgaacagttcgcttgccagcttgccaagttcttttgccaaaatcaggactttgaaggaaatctccagcacgctggacccagggcactccggccttcaccagcccaagtgaccctggggatttagcagcaacccggtcatcaggatgactttgtgcctctgtaaccaggtattgaaactgttcgtctcaccaggccggtccacgtggccctctgctgggggcttcctggtgggggggcagaaaagtctctctctctctctctctctctttttttttttttgtataaataacaaagtgttgaaatgtatttcctgaaataaatgtttcaaatacaaactttttttctgg

SEQ ID NO: 4 - DNA, 19 bp, homo sapiens
cagagcggcuuggguaaau

SEQ ID NO: 5 - DNA, 19 bp, homo sapiens
cgcacgauauugaggagaa

SEQ ID NO: 6 - DNA, 19 bp, homo sapiens
gagaugaucccauuugcug

SEQ ID NO: 7 - DNA, 19 bp, homo sapiens
gcauccacuucgaggcgua

SEQ ID NO: 8 - DNA, 19 bp, Artificial sequence
  Synthetic oligonucleotide
ugguuuacaugucgacuaa

SEQ ID NO: 9 - DNA, 19 bp, Artificial sequence
  Synthetic oligonucleotide
gcacuucgcuucaccucug

SEQ ID NO: 10 - DNA, 19 bp, Artificial sequence
  primer
ccgtgtgcacttcgcttca

SEQ ID NO: 11 - DNA, 19 bp, Artificial sequence
  primer
gcacagcttggaggcttga

SEQ ID NO: 12 - DNA, 23 bp, Artificial sequence
  primer
catggagaccaccgtgaacgccc

SEQ ID NO: 13 - DNA, 21 bp, Artificial Sequence
  Primer
cgtctgtgccttctcatctgc

SEQ ID NO: 14 - DNA, 20 bp, Artificial Sequence
  Primer
gcacagcttggaggcttgaa

SEQ ID NO: 15 - DNA, 20 bp, Artificial Sequence
  Primer
ccgtctgaactatcctgccc

SEQ ID NO: 16 - DNA, 20 bp, Artificial Sequence
  Priimer
gccgtagtcggtgtactcgt

SEQ ID NO: 17 - DNA, 16 bp, Artificial Sequence
  Antisense oligonucleotide
agacaagtagaggagt

SEQ ID NO: 18 - DNA, 16 bp, Artificial Sequence
  Antisense oligonucleotide
ctggtactcgtggtca

1. A method of treating or preventing a Hepatitis B virus (HBV) infection in a subject in need thereof, the method comprising administering to the subject a therapeutically or prophylactically effective amount of a SEPT9 (Septin 9) inhibitor.

2. The method according to claim 1, wherein the HBV infection is a chronic infection, or wherein the SEPT9 inhibitor is capable of reducing cccDNA (covalently closed circular DNA) in an HBV infected cell.

3. (canceled)

4. The method according to claim 1, wherein said inhibitor is an nucleic acid molecule of 12 to 60 nucleotides in length comprising a contiguous nucleotide sequence of at least 12 nucleotides in length which is at least 95% complementary to a mammalian SEPT9 target sequence and is capable of reducing the expression of SEPT9 mRNA in a cell which expresses the SEPT9 mRNA.

5. The method according to claim 1, wherein said inhibitor is selected from the group consisting of a single stranded antisense oligonucleotide, an siRNA and a shRNA.

6. The method according to claim 4, wherein the mammalian SEPT9 target sequence is SEQ ID NO: 1.

7. The method according to claim 4, wherein the contiguous nucleotide sequence is at least 98% complementary to the target sequence of SEQ ID NO: 1 and SEQ ID NO: 2.

8. (canceled)

9. The method according to claim 4, wherein the amount of SEPT9 mRNA is reduced by at least 60%.

10. A nucleic acid molecule of 12 to 30 nucleotides in length comprising a contiguous nucleotide sequence of at least 12 nucleotides which is 90% complementary to a mammalian SEPT9 target sequence, wherein the nucleic acid molecule is capable of inhibiting the expression of SEPT9 mRNA.

11. The nucleic acid molecule according to claim 10, wherein the contiguous nucleotide sequence is fully complementary to SEQ ID NO: 1.

12. The nucleic acid molecule according to claim 10, wherein the nucleic acid molecule comprises a contiguous nucleotide sequence of 12 to 25.

13. The nucleic acid molecule of claim 10, wherein the nucleic acid molecule is a RNAi molecule.

14. The nucleic acid molecule of claim 10, wherein the nucleic acid molecule is a single stranded antisense oligonucleotide.

15. The nucleic acid molecule according to claim 10, wherein the nucleic acid molecule comprises one or more 2′ sugar modified nucleosides.

16. The nucleic acid molecule according to claim 15, wherein the one or more 2′ sugar modified nucleosides are independently selected from the group consisting of 2′-O-alkyl-RNA, 2′-O-methyl-RNA, 2′-alkoxy-RNA, 2′-O-methoxyethyl-RNA, 2′-amino-DNA, 2′-fluoro-DNA, arabino nucleic acid (ANA), 2′-fluoro-ANA and LNA nucleosides.

17. (canceled)

18. The nucleic acid molecule according to claim 10, wherein the contiguous nucleotide sequence comprises at least one phosphorothioate internucleoside linkage.

19. The nucleic acid molecule according to claim 18, wherein all the internucleoside linkages within the contiguous nucleotide sequence are phosphorothioate internucleoside linkages.

20. (canceled)

21. The nucleic acid molecule according to claim 10, wherein the nucleic acid molecule, or contiguous nucleotide sequence thereof, comprises a gapmer of formula 5′-F-G-F′-3′, wherein regions F and F′ independently comprise 1 - 4 2′ sugar modified nucleosides and G is a region between 6 and 18 nucleosides which are capable of recruiting RNase H.

22. A conjugate compound comprising a nucleic acid molecule according to claim 10 and at least one conjugate moiety covalently attached to said nucleic acid molecule.

23. The conjugate compound of claim 22, wherein the conjugate moiety is or comprises a GalNAc moiety.

24. The conjugate compound of claim 22, wherein the conjugate compound comprises a physiologically labile linker composed of 2 to 5 linked nucleosides comprising at least two consecutive phosphodiester linkages, wherein the physiologically labile linker is covalently bound at the 5′ or 3′ terminal of the nucleic acid molecule.

25. A pharmaceutically acceptable salt of a nucleic acid molecule according to claim 10.

26. A pharmaceutical composition comprising a nucleic acid molecule according to claim 10 and a pharmaceutically acceptable excipient.

27. An in vivo or in vitro method for inhibiting SEPT9 expression in a target cell which is expressing SEPT9, said method comprising administering a nucleic acid molecule according to claim 10 in an effective amount to said cell.

28. A method for treating or preventing a disease in a subject suffering from or susceptible to the disease, the method comprising administering to the subject a therapeutically or prophylactically effective amount of a nucleic acid molecule according to claim 10.

29. The method according to claim 28, wherein the disease is a Hepatitis B Virus (HBV) infection.

30. (canceled)

31. (canceled)

32. (canceled)
